United States Patent Application Publication US 2025/0051766 A1 - sequence listing, part 9

SEQ ID NO: 5065 - DNA, 58617616 bp, Homo sapiens (residues 15,197,162-17,368,184 of 58,617,616)
  source 1..58617616: mol_type = genomic DNA
acctacctcatggggggctttacatgtgacctcaggtggccaagaactgtgaagctgggattactgggcccattttgcagaccatgacactgagatgtaaagagtttaattcctagccggtcagcaacatgatgtgggacttgaacccatgccaagaagagtgcagagcccctgctcagtttccaatggggaaacacgagaggttgcccaagccacacacatgtaggaagtggtagagacatccatggtgaacacagaggcagagggagaagacaaatcgcccctcccccccgcccccacacacagggcccactggtggctctgagccaggcactcacaggcaggcagcctcccgggagggcagctgggtgcaacgacctccatttgcacacgggcttccgtccaggcaagggggggctgtgtgggggtgaaggaaggtggaggatcagccaggtgcccaggaaccccaggcccaagtgacaaaccccctccctccctccaccaggcaacagctgcatggggatgggggcgtctctgcgggtgcagggagtccccccatccacagttcccacgccccccccccccccgccccagccccagctgttgaggctgcagctgtccctgccagctcgagccctgggaaccacaaagcaggggaaggcaggaggaggggctgtcttatgccagatgtgggggctcgggaagctgccagagctaagatgtgcagaatggggtgtgctgagacaggaagtaagggtgctgagtgttacagggaggtctggggcttcatgcccaggttcaggggtaatagaaggggaaggggcaggggatcctagggccacgggtcttcctttccctgatgggcatctactccagccaggcaggcctgcgtggtgctcttgggagagggaccaaggcatgtacccacgagtgagcacagcatctccagaagcagccagcgctgggcgttgctggaatagggtgtgtgttgaagggaggggcaactggcacaaggcatgtgctgccctgtccaacatcgccatccctaagggctgtgtccctctagggtgtggcatagtctaactgtcctgccagaagggtccagggtgtggctgggtctgagctagtggagaactgtgtgcatgcgatcaggtgtggggacacagtgcgtgtgtccatgcatgctcttgtcagagagagggtgatggagagaggaaggaagatcgagaaaaacacaaagacgtgagaatgaactagaagcagatagaccaggagaagacagagaaggacagaaagaaatagaaagcggccaggcatggtggctcacgcctctaatcccaacactttgggaggccgaggctggtggatcacctgaggtcaggagttcgagaccagcctggccaacacagtgaaacccagtctgttctaaaaatataaaacttagctgggcatggtagcaggtgcctgtaatcctagctactcaggaggctgaggcaggagaatcgcttgaacccaggagccagaggttccagtgagccgagatcacgccattgcactccaccctgggcaacaagagccaaactccatctccaaaaaaaaattagctgggtgtggtggcgcacgcctgtagtcccagctactcgggaggctgaggcaggagaatcgcttgaacctgggaagcggaggttgcagtgacccgagattgcgccactgcatgccagcctggcaacagagtgagactgtctcaaaaaaaaaaaagagagagagaaggacagaaagaaatagaaaacaagagggtgagttacagaatctgtcgagctgaacctgagcatgggcctacatagtatatgccccttcctcacaggacaagccgactggacaccatcacccacaccaggacctgtgggtgttcgtgaactcacactgtgggtcccataacatgggctatgggccaccctgagctgtaggcaatgtgagccacatgtgtgtgcgtgcacgggcttgtgtgtctgtatgtggatttgggcatgcatctattgtgtctcagttgcagctacatgtgagtctatctgtacatgcatgtcagcgtgggtgtgcccgtgtgtgtatgagctgcacacccatacgggaatgcacagatgtgtgtgctgtctgtatgcaggttgtgtctgttgtgcgtctgtgtatgtgaaccgtgtaaatgggtgtacagctgtgtgttggtgtgacctgtgtgtgcaccgctgtgtctgtgtatgggttggctgtgtctgtccatctgcatgtgtgagctgggtgtaagcatgtccttgagtcttcatctatgtgctgtctgagtgtgtgcaggcagcgtgtgtgccacacctgtgtgatcatatttgtgtgtgtatgtatgtcaatgtgtgagctgtgtgcgtgcagctgggtgtgtctttcctgagccaggtgtgcaagtctgcgagtgtgctgtgtgtgtgcaggtttgcatctctgttacgtgacctagagctatgtgtgccagcgagtgtgtcacaggccatgtgtgtgcgccgctggtccggcggaggcggcggctcctgcctggtcctgccccgtccgggccccggggctgggctggggaggccgttcactcccgaaacccccaccccgcccagcgccaagccccacactggcgtctgggacccctggccaggggccttggcccgcgcccctcccccgcccaccaggcctcccgtagcggtgaggggggtgcccccgcagccccctccccggcccagccgcgggtcccgctttgtctggcaaagaaagcgcgaggccggccggagggagggggtgtctagacggcgcggccattgtcccgagcgggggaggggagggaggagaggaggaggggcgggggcccctggccggctggggaggggctctggccgcggggagggggcgctggagccgaaggggagcacgtgggccctcgccccttcccctccccgcgcaggggcggggtcccagggcctccgggtccccgcggccagaggagagaggcgggctgcgggcgggggagggggcgcgcgcgccgccgaggctccggctcggaatccggctccgggtcttgctgcgcgccggcctgggaagttttctccgagttcagagctcccagaacttcgcgccccctccccaccccccgcctggcccagcccgcccggggtgtcgggggcggggtgggggggcttttgtgcgagaggtccccggcctagaagtacctgggcccccaatcataacctacccaggactccaggcgtgagttggatggggacgagtcccgaactctgtacgcacccccccacctcgagtccctgatccccgcacctcgagctcccagtctcggactcctgggtcccttcatcttcagctctaatcgctcaagggtccctgttccttgggcctctggggtcctccccattctgaatctctgggtcctccaggactggcatgaagcccggggctcctgcgccccttccccgaccctggttcctgcctcccatgaacccccgccagccccggccttgggggttcttgcactccccctctgccgccctcgtcccatccgccaggtcccggcccctcacctgcagcccccggccccgctagcagcagcagcaggggcagcgcccgcacgggtggcggtggcggtggcggcgacatcgggcgacggcggcggcggcggccacgggcccccggccccatggcggccggccgcgaccctcccctcctccctccttccctgggctccgggcgcgtcccgggccagcctccgcgccgccaacttcgccgaagtgaggcggccgggccgccccgcccccagccctcgaaggctcgccccgccccggggccggcccagcgcgcccccgccccccgcccggcctcccggggtccctgcccaccctccacccgcacagcctgggacgcgcggaccctcggaaacccaggccgagcatgcagtgagacgcgggcagaacccggagtggcgggcacacccaacctcgtgaacgcccacgcaccccatccccatcccccagtacacacccagagccggacacctctggagccgggacaaaaaacacagcctcccagaaactctggaaactgaggccagtcacgtcctgagaggctcatggacccacagccacggacgcacaaatgcaagcccatgcaccaagcttccccaggactctgatctaaaacattcacaaacctaaaagtcggaccgggcgcggtggctccggcctgtaatcccagcactttgagaggcagaggtggatggatcacttgaggtcaagagttggagaccagcctggccaacatggtgaaacccggactctactgaaaatacaaaaattagctgagcgtggtggcgcacgcctgtagtcccagctattcgagaggctgaagcaggaaaatcgcttcaacccaggaggctgaggttgcacttagccgaaatcgtaccactgcgctccagcctgggcaacagagtaagaccctgtctcaaacaaaacaaacaaacaaaaaaccgctaaaactcactcagccaggccaggagcctaggactacatttgcagcctcagacctcagacacgtactaggagtcacatgcatgtgtgtgtgttcacacatgcacacacaaactcttcttgctctcagccctcccagaaagcaacccacttcctctgtgactctcaaagggtcaccccagccccctagtcccacccccataccccacacagctttgggcctcagcctatctggctcaatttgattaattctcttttctttttttttttttttttgagacagcgtgtcgctctgtcacccaggctggagtgcagtgtccctatcttggctcactgcaagctctacctcccaggttcaagcgattctccttcctcagcccccacccccacaatctgccaagtagctgggattagaggtgtgcgccaccatacgtggctaattttttctgggtttttgtttacttgtttgtttgtttttgagacggagtctcgctctgttgcccaggctgaagtgcagtggcatgatctccgctcactgcaagttccgcctcctgggttcacaccattctcctgcctcagccgtccgagtagctgggactacaggcaactggcaccatgctctgctaattttttttttgtatttttagtagagacggggtttcaccgtgtcagccaggatggtctcgatctcctgacctcgtgatctgcctgcctcagcctcccaaagtgttgggattacaggcgtgagccaccgcgcccagcttctatttttttagtagagactgggttttgccatgttggccaggctggtctcgaactcctgacttcaagtgatccgcccgcctcagcctcccaaagtgctgggattacaggcgtgagccaccacgcccagccttgatcaattgccttttcccaaatcagtcatgctgcacaggcttcctgcagctccctctgttcctgtggaaagaatggggaccctgagaggcctggagcccagccctggaggaacttccagtctggggaagaaaaagctagacgcacacacacccagtgtggagggctcagggctgggccagagaaaggcatggaatctgggaagggcctggggtacacgggtggtgggtgaggactttgcctgggagggttatttatttgttcattcatgtattcaacaagtatggctaaggctccagccctgtatcacactctgttctatggactgggggtgcaccctggagggcgtccaagaggacgtccagtggggcttggccctgaaagttgagctggagggaagtcatcccagcagagggactggcccatgccaacaggaagggacagagttggaagggaacgtgtacaggccagaggttaagaggagaaaggagccatgcttactccttggtatctggcttggtgataaggatgctggaagaaggaatgggttgggtggaggagagatgctgggtttgagggggtcacctacaaggcaggtatggctgagcatgggagaaccattctggtaggagatagtcacatgggtatcccagaaatcttcagacaatttttttttttagacaaagtccctctgtcacccagactggagtgcagtggcgcgcgacctcggctcactgcaacctctgcctcccgggttcaactgattctcctgcctcagcctcccaagtagctgggattacaggcacacaccaccatgcctggctttgtatttttagtagagacagggtttcactatgtaggctaggctagtctcaaactcttgaactcaggtgatctaccctcctctgcctcccaaagtgctgggattacaggcatgagccaccacgccgggccaattttttttttttttttttttttttttgagatggagttttgctcttgttgccccggctggagtataatggcgcaatctcggctcaccacaacctctgcctcctgggttcaagtgattctcctgcctcagcttcccgagtaactgggattacaggcatgtgccaccatgtgtggctaattttgtgtttttagtagagacagagtttctccatgttggtcaggctggtctccaactcccgacctcaggtgatccacctgcctcagcctcccaaagtgctgggattacaggcatgagccaccacttccggactctttttttcttaagaccaagtctcggtctgtggcccaggctggagtgcagtggtgccatctcggctcactacaacctccattcctgagttcaagcgattctcctgcctcagttccccccgccaccccaagtaggtggaactacaggcccacaccaccatgcccggctaatttttgtgtctttggtagagacagggtttcaccatgttgtccaggctggtctcgaactcctgacctcaagtgatctacccacctcagcctcccaaagtgctggaattacaggcgtgagccgccatgcctggccacagtttttttaactttttatttgaaaataatttaagccgggcgcggtggctcatgcctgtaatcccagctctcagggaggcaagaggcgggaggatagcttgagcccagaagttcaagacctgcctgggcaatatagtgagaccccattctccacaaaaaggaaaaaaaaaaaaagacgaaaataatttaaaacacacaaagttgcatgccgggcgtggtggctcatgtctgtaatcccagcactttgggaggctgaggcaggaggattgtttgaggccaggagttcaaaatcagtctgggcaacatagcaagacctccatctctataaaaaattaaaataaaattaagagggtgtagtggtgagcgcctgtagtcccagctacttgggaggctgaagtgggaggatcacttgagcctggatgtcactgcacttcagcctgggcaacagagcaagaaccaacttcaaaacaaaaacaaaaaaaactgagagttacagaatagcgtgaacaacttgtataagccctttgtccagattcaccaaccacccacattttgccacatttgacatatatgtgtacatatacgttatacacatatgcatatatgcattttttggctaaatgatttgagagtaagttgtagatatgatgttcctttgccttcaaatactttgctgtgtgtttcctgagaacaagggtatcctctttcataaacatactacagtttttgccccagtctgtattcaaagtttgctagttgcccaaataatatcctttattgggccaggtacagtggctcacacctgtaatcccaacactttgagaggccaaggagggaggattggttgaggccaagagttcaaggccagcctgggcaacatagtaagactcctgactctacaaaactagaaaaaattagcagcatatagtggcgcgtacctgtagtcccagctactcaggaggctgaggtgagagcgttgcttgagcccaggaggtcgaggctgccgtgagctgtgatcatcctgctccactccagtctggataacagagcaagaccctgtggggaaaaaacaaaaaaattagtggccgggcgcggtggttcacacctgtaattccagcactttgggaggctgaggccggctgatcacctgaggtcaggagttcaagaccagcctggccaacatggtgaaaccccttttctactaaaaatacaaaaattaactgggcatggtgacaagtgcctgtaatcccagctactcgggaggctgaggcacgagaatcgcttgaacccaggaggcggagtttgcagtgagccgagatcgcgacactgcactccagactgggcaaaagagcatgattcagtctcaagaaaaaaaagaaaagaaaagaaaaaaaaaattaaatcttttattgcaatgtttctttgctggcccaggatctatctaatgctgcatcatgagttgcatctaatccttttgttttgagacagagtctcgcactgtcacccaggctggagtgcagtggcatgatcttgactcactgtaacctccacctcccaggttcaactgattctcctgcctcagcctcccaagtagctaggattctcctgcctcagcctcccaagtagctaggattctcctgcctcagccccccaagtagctagccaccacacccggctaattctaatccttatatctcttggtctcttttaatctgaattggttcctcagtctttctttgtctttcatgacactgacgtttttggagagctgaggtcagttgtgcagaatggccagcagttgtgcaggaatggctggcctgccatttcctcgtgatcaggttcaggctgtgcatcttcggcagaaaccacagaagcattgctgggtcctcctgggtgcatcgtatcaggaggttcctgacatcagttcccagcattggtgatgttcagctgtcatcaccggggcaaagttggtcaagtttccctgctataagggtgccattttcctccctttccatcctccccctttgtaagggggatgaaagttgaatgactgaccaggggctagcatcgcagaacagttaccctatagggagatacattgagaccgtgtgaatatcctactgcccaataagctttcccccatagattttagcatcttttgattatttctcctgatcattgttttgctttctttttttgttcgtttgtttttgttgttgttgttgttgttttctttctttctttcttttttttttttttgagacagtgtcttgctctgtttcccaggcagggttccagtggcacaatcatagttcactgcagcctcgaactcctgggcccaagtgaccctccttcctcagcctcccgagtagctgggactatagacacgccccacaactcctggccttctctggtgctttttgttttaattgaggtaaaattcacataacgtaaaattaaacattgaccactttaaagtgtgttcatactgtgtgaccatcacctctagttacagatcatttccatccctgcaaacggaaacctccccattctccctcctccaggccctcgaacccactaatccactttctgtctctatgaatttatccattctgggcatttcgtgtcaatggaatcatacactatgtagccttttgtgtctggcttctcatcatgtttttggggttgttctatgttttagcatggatcctggcttccttccttttaattttattttattagttattattattattattattattattattattattattattattatttttcaagacagggtctcactctgttgcacccaggctggagtgcagtggcacgatctcagctgactgcaacctccatctcctgggttcaagtgattctcctgcctcagcctcttgaatagctgtgactacaggtacttgccaccacactcagctaatttttgtatttttagtagttaataatcctagttattttgtaaaaatataaaaatttatgtttttaatagagcctcaccatgttggccaggctggtctcagcctcccaaagtgctgggattacaggcatgagccactgtgcccggccttccttcctttttatggctaagtaatatttcattgaatggctataccacacattacttatccagtggtccattaatactttggatggatgattttttttttttttgagacggagtctcactctgtcacccaggctggagtgcagtggtgtgatctcagctcactgcaacctccgcctcctggattcaatcaattctctgcctcagctctcaagtaactgggattacaggcactcaccaccatgcctgactaatttttgtattttagtagaaacgagggtttcactatcttggccaggctggtctcgaactcctgaccttgtgatccacccgcctcggcctcccaaaatgctgggattacaggcatgaaccactgtgcctggctggatggattttttttttttttttgacggtctcttgctctgttccctaggccggagtgcagtggcgcaatcttggctcactgcaacctctgcctcccaggttcaagagattctcctgccttagcctcctgagtagctggggttacaggtgcaccaccatgcccagataactttgtgtatttttagtagggacagggtttcaccataccgtccaggctggtctcaaactcctgaccttgtgatctgcccgctttagcctcccaaagcgctggattacaggcgtgagccaccacgcctggctggatggatgatttttaaaggctgaaagagaaagaagcaaaggagacagagaaggattgtcaaagagagacagccgggcatggtggctcatgcctgtaatcacactttaggaggcagatgcagaagaattgcttgagctcaggaattccagataagcctgggcaacatagtgaaatcccatctctataaaaaattttaaaattgccgggtgtggtggctcacccctgtaatcccaccatttgggaggccaaggcgggaggatcataagttcaggagatggagaccatcctggctaacatggtgaaaccccgtccctactaaaaaatacgaaaaattagccaggcatggtggcacgtgcctgtagtcccagctactcagaggctgaggcaagagaatcgcttgaacccgggaggcagaagttgcagtgagccgagattgtgccactgcactccagcctgggtgacagagtgagactccgtcacaaaaaaaaaaaaaaaaaaaaattaattatctgggcatgggcacacactggtagtcccagctacttaagagtctgaggggctgggcgcggtggctcacatctgtaatcccagtactttgggaggccgaggcgggcggatcatgaggtcaggagatcgagaccatcctggctaacacggtgaaaccctgtctctatttaaaaaatacaaaaaattagccgggcgtggtgatgggcgcctgtagtcccagctactcgggaggttgaggcaggagaatggtgtgaacctgggagacagagctttcagtgagccgagatcgtgccactgcactccagcctgggcgacacagcgagactccatctcaaaaaaaaaaaaaaaaaaaaaaaagaagaggctgaggcggaaggatcgcttgagcccaggagttccaggctgcagtgagctatgatcacaccactgcactccaacctgggtgacagagctgtctcaaaaagagagagagagagagagtgctaaggatgaaagttgaggcccgggcacagtggctcacgcctgtaatcccaacactttgggaggccgaggcgggcagatcacaaggtcaggagttccagaccagcctgaccaacatggtgaaaccctgtctctactaaaaatacaaaaattagccgggcatggtggcgcatgcctgtaatcccagctactcaggaggctaaggcaggacaaccacttgaactcgggaagtggaggttgcagtgagccaagatcgcgccactgcactccagcctgggtgacaaagcgagactctgtctcaaaaaaaaaaaaagaagaagaagaaagttgaatgactgaccagcggctagcatcactgacaacccctggtcttgccctggcttctcagagggcaggaggtgaagatgttcaatcatttccatcttacaggtacagccatataacttagagaagacaggccaggcgcggtggctcacgcctggaatcccagcactttgggaggctgaggtgggtggatcacctgaggtcaggagtttgagaccagcctggctaacatggtgaagccccgtctctactaaaatacaaaacttagctgggcacggtggcgggtggctgtaatcccagctactcaggaggctgatgcaggagaatcgcttgaacctggaaggcagaggttgcagtgagccgagatcgcaccactgcactccagcctgggcaacaatagtgaaactccatctcaaaaaaaacaaaaaacaaaaaaaacagtgactcactgcagcctttctggaagaaaagttgaggtttgaagctaagtctcaagccaggtgtagcggtgcacgcctatagtcccagccactcgggacactgaggcaggaggatcgcttgagcccaggagttccaggctgcagatgatcatgacactgcattccagccttggagcaagactttctcaaaagaaaaaaaaaaaactggctgggcacagtgtagcacacctgtaatctcagaactttgggaggctgaggcagaaggatcacttgagctcagagtttgagaccagactgggccacatagtgagactctgtctctacaaaaaaagaaaagaaagaattagctgggtgtggtggtgtgcacctgttgtcccagctactcagggggctgaggcaggaggatcacctgagcctagagttcgagaccagcctgggtagcacagtgagaccccatacacctgtagtcccagctatgtgggcgtctgaggcaggaggatcacctgagcctaggagttccagactgcagggagccatggtcgagtcgcaccactgcactgcagcctggccaacagagtgaccttattaaaaaaaaaaaaaaggaagaaaaagaaaaaaaatgaacctgggtctcagtgactcccggccacatggagtacaggggcggggtaggggttgggcagaggaataacagaagttgcctaagaaggggcacacactgactcacggtgactgtgctgagtcaagaggcccatggggacaggcacagatctagtcctgcgtcatgcctaccacccaggaaggaaatccaaggccctcagtcctgcatttgggccccttgggccgggactgaccctctccttcctaaccctccccaccaaacccccagcaaaaacaacaaacaaaaaaccattgtcacaccatgtcaaaccccagatgcaaccagcaggccttgtgctcccatggtctttgcctgggtgcttccctctgcctgagacacccagctgcacagaaacacccttttgcttcctccccaagcaggaactcacagccagtgtgacctcttcaaaaattcattttcttccagctagagggaatgttctgctgtttctcacacagttctcacacaggccacccctttgcccatgccgctctctttatttttttcttttcttttcttttttttttttttttttgagacagagtttcgctcttgtcacccaggctggagtgcagtagtggtgtgacctcggctcactgcagcctccacctcccaggttcaagtgattctccggcctcagcctcccatggaattacaggggcgggccaccacacccggctaatttttgtatttttagtagagatggggtttcaccatgttggccaggctggtctcgaactcctgacctcaagtgatccgcccgcctcagccttccaaagtgctgggattacaggcgtgagccaccacgcctggcctgctctctttctttctttctatttatttatttacttatttttaatagagacagggtctcgttctataggccaggctggagtgcagtggcgtgaacacagctcactgcagccttgacctcccaggcttaagtgatcctcccaccttggcctcccgagtagttggaattacaggtgctcagcaccacaccctgcttatttttgtattttttgtagcgatgagtgtctcgctatgttgcccaggctggtctcaaactccagagcttgagcgatcctcctgctcttggcctcccaaagtgctgggattccaggcctgagccactgtgcctggccccttatttctatttctggttacctcctatccattcttcagggataccactccgggaagtcctccctgtccctcagtctgcgctgctctctccccgacacccccgctctcccggtgccctttttctccatggctcagccttgttcacaaggggttgggggtgtctgtaccctggtttgtcccctatttaaagactaagggctggctgggcacaggggctcatgcctgtcatcccaacactttgagaggacgaggggggtgggtcacctgaggacaggcatttcagaccagcctgggtaacatggtaaaaccctgtgtctacaaaaaacacaaaaattagctgggcatgctggtgcatacctgtagtcccagcaattcagaagactgaggtgggaggattgcttgatcctgggaggtggaggttgcagtgagctgagatcgtgcccctgcactccagcctgggtgacagactgagaccctgtctcaaaacaaaaacaaaaaacaaacaaacaaaggactgagggctccttgggggttagacagaggatgaggcttcttgagggtcccagcatcccccagcatggagtgagcaaaaagcaggtgacgtaggacggtttggtgactcaggaaggggctgaaggagctgggaagcccagcccagaagagccacttcagggccgggcgaggtggctcacgcctgtaatcccagcactttgggaggccaaggtgggcagatcacgaggtcaggagatcgagaccatcctggctaacatggtgaaaccccatctctactaaaaatacaaaaaattagccgggcgtggtggcaggtgcctgtagtcccagctactcgggaggctgaggcaggagaatcacttgaacccagaaggtggaggttgcagtgacccaagatcgcaccactgcactccagcctggtgacagagtgagaccctgtcccccgaaaaaaaagccacttagccacttcaggggcctcaaaccactctgttcagtataattttgcaggcgggggtggtctatggttccacagaagggtctagggattgaggggcaaagttagggccctcaaggaaaggccagctcctcccttggcccatctgagaaggggctttctttcttttttttctttattttatttatttatttatttattttgagacagaatgtcattctgtcacccaggctaggctgcagtggctcgatctcggctcactgaaacctccgcctccggtgttcaagcgattgagaaagggctttctgctggaatggatgctgtaggaggtgctgagctcctcatcactaggagcaaccaaggaccctggacacacatttcactaggcaggaagttcagagtctgtgactgctgatacagcacaccctgatctgtgggagagggggaagtaacggtgaaaacccaggcagaggacttcacgggggaatacagactaaaagaagaaagacccggccaggagcggtggctcatgcctgtaatcccagcacttggggaggctgagacgtgcggatcacttgaggtcaggagttcgagaccagcctggccaatatggtgaaaccccatctctactaaaaatacaaaaattagtcaggcttggtggcagacgcctgtaatcccagctacttgggaggctgaggcaggagaatcacttgaggcaggagaatcatccctgcaacccaggaggcagaggttgcagtgagccgagatcgcaccactgcactccagcctgggcaacagagcaagactctatctcaagaaaaaaagaaaaagaccccgccgggtgcagtggctcaagcctgtaatcccagcactttgggaggccgaggtgggcggatcacaaggtcaggagattgagaccatcctggttaacatggtgaaaccccgactctactaaaaatacaaaagaaattagccgggtgtggtgacgggcgcctgtagtctcagctacttgggaggctgaggcaggagaatggcgtgaacctgggaggtggagcttgcagtgagcagagattgtgccactgcactccagcctgggagacagagcgagactccatctcaaaaaaaaaaaaaaaagaagaagaagaaagacccatctacaaagcacccgctcagccgaagatggggtctcagctgcgggttcctgccactgccctccagccacggtggtgggacccacccaaggtgtccagatccctaggggactgggcagtcggagcaacccttcccatggccttgcagctgcggccgcacagttcccaacatggtgggggtgggcttgagccccctccccggcccctgctggctgccttggctggggactgcatttctcctccatgagctcagtccctggggacgcgggacctggggccaggccaagacacagctgccggcccgctgaccgggaacctgagaatgtgcccttggcttctcctcttgggactacagtcccgccctctgcgcggaagctggggccaggttctcgagccaggcagtgggctgtgggagcctagtgagaaccagcaggagtgagggcaattgagtgtgggccttcggcaagtgtggggaggctggacccagccatgtcccctggacactgcttccctgggacactccgatgcttgaaacttccatggctccccattgcctgaagtgacacaattcctccccacctcatcagcttcatctccctgcctctcagccttgtcagcctttgcatgcagagttcccactggtaggaaaatgcttctcatactacaaaggctcctttcccctggctgctcactctgaacctccagctcttctcaccttcattcagtcattcaacaaacatttactggacacctacttggtgccaggccttattgtagacagaggtgacccaagacagagccagttcctgccctgagaagggaagcagacaagaaacaaataggcaaacaagaaccatcaaggttgagtgcagtggctcacgcctgtaatcccagcactttgggaggccaaggaaggaggatcacttgagtccaggagttcagaaccagcctggtcaacatagcgagaccccacctgtctcttcagaagaaaaaaaaaaatttttttttgagatagagtctcgctctgtcactaggctagagtgcagtggcaccatctccactcactgcaacctccacctcccggatccaagtgattctcctgcctcagcctcctgagtagctgggattacaggcatgcgccaccacgtctggctagttttttttttttttgtatttttagtagagacagggtttcaccatgttggtcacgctggtctcgaactcctgagctcgtgatccacctgcctcggcctcccaaactgctgggattacaggcatgagccaccatgcctggcctaagaaaattttttaaattagccaggcataggtggtgcatgcctgtagacccatctactcccgaggctaaggcaggaggatcacttgagcccagagtttgaggctgcagagagctatgattgtgccattgcacttcagcctgggcaaaagagcaagaccctgtcttaaaaaaataataataaagaggctgggtgtgatggctcatgcctgtaatcccagcactttgggaggctgagttgggtggatcacctgaggtcaggaattcgagaccagtctgggtcaacatggtgaaacctcatctctactaaaaatacaaaaattagccgagcacggtggcaggtgcctgtaatcccagctactcaggaggctgaggcaggagaattgcttgaacccgggaggcggaggttgtcatgagctgagattgcaccactgcactccagcctgggtgacggagggagattccatctcaaaaaaaaaaaaagaaagaaaaaagaaaagaaaccaaaacagagccattgagacaagatggttaaatgtgagggagagagggggaagtcacctaaagaaggagaggagccagcgaggcaaacatccagggctagggtgttccagacagagtgaacagcaagtgcaaaggcccagaggaggaaggagagggtggacgagaggaacagcgaggaagcctgggtgcctggtgctgaatgagcaaaggtgaggaggtcagggaagcaggtggggctgactcccaaggggccagagggtctgggattctagcccaagcacagtgaagccactggagggttttagcacaagaagctgatctgatttagtttgcaaacaatcactttgggtttttttggttttttggagacagagtctcactctgtcgcccaggctgtagtgcagtggtatgatctcacctcactgcaacctctgcctccgggttcaagtgattctcgtgcctcagcctcccgagtagctgggactacaggtgcacaccgccatgcccaggtaatttttttgtttctttgagacagaatttcactcttgtcacccaggctggagtgcaatggcgtgatctcgactcactgcaacctccgcctcccgggttcaagctattctcctgcctcagcctcccaagtagctgggattacaggcatgcaccaccacgcccagctaattttgtatttttagtagagatagggtttctccatgttggtcaggatagtcttgaactcccgacctcaggtgatccacccacctcggcctcataaagtgcttgggattacaggcgtgagccactgcacccgccatttttatttatttatttttattttttcacggagtctcactctgttgcccaagctggagtgcaatggtgccatctcagctaactgcagcttccacctcctgggttcaagcaattctcatgcctcagcctcccaagtagctggaattacaggcaccagccatcatgcccagctaatttttttatttttgtaaagaacgggttttaccatgttggtcgggctggtcttggacttctgacctcaggtgatcggcccacctctgcctctcaaagtgttgggattacaggcgtgagtcaccgcctcagccttttttttgtttgtttttttggagttagagacaggttctctctttgtcacccaggtggagtgcagtggtgcaattgtagctcactgtaacctcaaactcctgggctcaagcgatcctcccctcagcctcctaagaagctaggacctacagacatgcaccaccatgcccggctaatttttttttctttgtctttttttttttttttttttttttttgagacggattctcgctgtcgccaggctggagtgcagtggcatgatctcagctcactgcaacctccgcctctcaggttcaagcgattctcctgcctcagcctccccagtagctgggactacagatgcgtgccaccacgcttagctaatttttgtatttttagtagagacggggtttcaccatattggccaggatggtcttgatctctcgacctcgtgatctgcccgccttggcctcccaaagtgctgggattacaggcgtgagccactgcgcccacccttttttttttttttttttttcctgtagagatacagtcttgaactcttggcctcaagcaatcttcctgcctcagcctcctgaagtgcgggaattacaggcatgagccaccatgcccagcctggaattcacttcgatggagcgtctgcagctctgtggctctgggaaagggtagaagggaggccattctcaaccccttctgggggtgctggtttccccaccccagaagcttccattgggtctgacgccctgttctctgtcctgtcttctcaggccctgggctccggaccacagcaaccttccatgcccatggcctcaccctggatcttatctcctcttgctcacctctgaactgtgatattctgatgtcccctaactcagtggcctccaacctctttggcaccagggactggttttgtgaaagacaatttttccacggaccggggtagggggtggtttcgggatgattcacgtgcattactttttttattttttacttttttgaggcggagtttcgctcttgttgctcaggctggagtgcagtggcgtgatctcggctcaccgcaacctccgactcccgggttcaagcgattatcctgcctcagcctgccgagtagctgggattacaggcatgtgccaccatgcctggctaattttgtatttttagtagagatgaggtttctccatgttggtcgggctggtctcaaactcctgacctcaggttatcctcccacctcggcctcccaaagtgctgagattacaggtgtgagccaccgtgcctggacactggacactttctttttttctttctttctttttttttttgagatggagtctcactttgttgcccaggctgaagggtagtggcacaatctcggctgactgcaacatctgcctcccgagttcaagcatttctcctgcctcagcctcccgagtagctgggattatatatgtgcaccaccacacccagctaatttttgtatttttagtagagacagagtttcaccatgttggccaggctggtcttgagcccctgacctcaggtgattcgcccgccttggcctcccaaagtgctgggattagaggcgtaagccaccgtgctcggcctacattttaatttttatttatgtatttgagacagagtctcgctctgtcacccaggctggaatgcagtggtgtgatctcggctcactgcaacctctgcctcttgggttcaagtgattcttgtgcctcagcctcctgattagctgggattacaggtgtgcgccactacacccacctagtttttgtattttcagtagacagggtttcatcatgttggccaggctggtctctaacacatggtctcaagtgatccatccacctcagcctcccaaagttgtgggattacaggcatgagccaccgcgaccagcctcaaacgcataagatttattgtgcactttatttctattattattacattgtactatatgatgaaataatgatacaaccgtaatgtagcaacagtgggagccctgagcttgttttcctgcaactagacggtcccatctgagggttatgtgagacagtgacagatcatcaggcattagatactcataaagagcatgcagtctagatccctcacatgcgcggttcacagtagggtttgcactcctatgagactctaatgctgctgcttatctgacaggaggcagagctcaggtggtaatttgcggagggggaggggctgtaaatacagatggagcctcgctggctctcccgccactcagcttctgctgtatggccctgtttctctgtggcctgaggtttgaggacccctgcccttactgctccctgaccccagaagtttgtcctccttcctgtaggggtgacacttgtccccactgtcccaactaccttccctcctacttgagagaaggggacctcctcccctaggctttcattacctccttccttagccataggctgaaatctcttccatgatgaagtaaaaatctggccaggtgcagtggcccacacctgtaatcccagcactttgggaggccgaggagggcagatcacttgaggtcaggagtttgagaccaacctggccaacatggtgaaaccctatctgtactaaaaataaaaaaattggccaggcatggtggttcatgtctctaacgtcagcaatttgcaaggcgggcagatcgcctgagttcaggagttcgagagcagcctggccaacatggtgaaaccccctctcaactaaaaatacaaaaattagccaggtgtggtggcgggcacctgtaatcccagctactagggaggctgaggcaggagaaccgcttgaactcgggaggcggaggttgcagtgagccaagattgtgccactgcactccagcctgggtgacagagcaagactccgtctcaataaacaacaaacaaacaaacaaaaattagctggaggtgatagtgtgagcctgtagtcccagctacgcaggaggctgaagcaggagaaccacttgaacccaggaaggcagaggttatagtgagcttagatctcaccactgcactccagcccgggtgacagagtgagactccatcttacaaaaaattaaataggcagggcctggtggctcacatctgtaatcccagcactttgggaggccaaggtgggcagattgtctggtggctcacatctgtaatcctagcactttgggaggccaaggtgggcagattgctgagctcaggagttcaagaccagcctgggcaacgtggtgaaaccctgtctctactgaaatacaaaaaattagccgggcgtggcagcgtgagcctgtaatcccagctactcaggaggctgaggcagtagaatcacttgaacctgggagttggaggttgcagtgagccgagattgtgccgctgcactccagcctggaagacagagcgagactccatctcaaaaaaataaaaaaatacaagaaataaataaatactaaagtaaaatccacagcaaatgctcatcccacatctgcccggccccagctctggtcgcctctccctgctttgcacctccccagacccctggctccacctctcccttctccactccactctgtgcattctacagatgttcttgtcctccagtttccggtgggtttggacaactggaggcactagcagaagatgtagggcgggcttggtggctcatgcttgtaatcccagcactttgggaggccgaggtgggcggatcacttgaggtcaggagttcgagaccagcctggccaacatggtgaaaccccgtctctactaaaaatacaaaaattagccgggcgtggtggtgggtgcctgtaattccagctacttgggaggctaaggcaggagaatcacttgaacctgggaggcagaggttgcagtgagctgaaatcacgtcactgcactccagcctgggcaacaagagcgacaccccatctcaaaaaaaaaaaaaagaagaaaaagaaaaagaaaaaaaaagatgtcagaggaaagtgaattggggacactaatcctcccggatccctccctgcggggtcgcctcaacttggctgtgtccatcatccacacgactctctccctaggctctgctaacatccttccccttgccccatcgggagcatccagaaatgataaaggatctccaagggtgcttgccctggctgcctcagcaactcctgttggtttccccaaactctgcccacaccactgtgtatagtccttgcagcaaacctgcctcaaatttcccggtttgtaattttttttttttttaatttttagagactgggtctcactgtgttgcccaggctggtgtcgaactcctaaactcaaacgattatctctcctcagcctcccaaagctctgggattacaggagtgagcccgggtgcctgaccgcattactctgtttgaatgtgttcagttgtttttccccaagcctccaatatttccttgcccctccctgcttaacctcattcagagcagccaagccctctgccttcagtctcactcctggctttcctccctcataacttggagatttgtatagctctcacttgattatctcagaggttgtttttgttttattttgttttgttttgttttagggttttttgttttttgtttgagacaaggtctcgctctgtctcccaggctggagtgcagtggcacgatctcagctcacggcaacctccacctcccaggttcaagcaattctcaagcctcagtttcctgagtagctgggactacagggacccgctaccacgcccagctaagtgtttttttttttttaagtagagacggagtttcaccatgttggccaggctggtcttgaactctggcctcaagtgatctgctcaccttggcctcccaaagtgctgggattacacgagtgagccactacgcccggcctgggtttttgtttgtttgtttttaagacacggtcttgctctgtctccaggctggagtgcagtggcatgatcacagctcattgtagtcttgacctcacaagctcaagcgatcctcccatctcagcctcctgaggagctaggactacaggcacacgcctccatgcccagcagttaaatttttttttttttttttaagagacaaggggtcttgcaatgtttccaaggctggtctcaaaactcttggtctgccgtgatcctccttcctcggcctcccaaagtgctgggattgaaggcatgaaccaccacgcttgtctctcagcagcttgtgacgccaggaactacatccctattccttgacgctcctccctcctccattgctggggcatcacttttgcctggttcacctcctacctttttttttttttttttttttgagatggagtctagctctgtcatccaggctgtagtgcagtggtgtgatcttggctcactataacctccacctcccgggttcaagcgattctcctgcctcagcctcccgagtagctgggattacaggcgcccaccaccacgcctggctaatatttgtatttttagtagagacggggtttcgctgtgctggacaggcttgtctcaaactcctgacttcgtgttcctcccgcctcggcctcccaaagtgctgggattacaggtgtgagccactgtgcctagactttttttttgagatggagtctccctctctcgcccaggctggagtgcagtggcatgatcttggctcactgcaacctctgcctcccgggttcaagtgattctcctgcctcagcctcccgagtagctgggactacaggcatgtgccaccatgcccggctaattttttgtaattttggtagaggtggggtttcaccatgttagccaggacggtctcgatctcctgaccttgtgatctgcccgcctcggcctcccaaagtgctgggattacaggcgtgagccaccgtgcctggcctcacctcctacctttgtggcctctctcctctgcctgtctctgaggtgttgggggtcctcagggttcagtctccagtcttgttctccattctgctctagggagacttcaccctcgctcccagcttaagagcctctctgccccacaatacaccgatgcttgctgggctatttttgtctttagcccataacatgcttctaagtccctaccccgggatccagcgccgtcagactgaatatatcccaaacctgcctctgtaccttctcagcgtatctgctcctcttccagtgcctggacttgagtctcgttctccactgcctggaccacgcccatcctcctctgaggccttcccgtcctctggtccggccttctcaccatcccccaagtaacattccagacacacggatctgtccgagaccctcccctgctggcatgtgaagccttttatagtctcacgtcttcctagcccaaactttcctcccagtctcacggaaatgctaaatcatcccggcgtgggaggcttctgtgggtcggggcgcagctttgcaaggttcagctccaagactgcttcctccagggagccttccctcccttcccccaggtaagtgctcctccccagttgctcattccaccagggcctgatcacaccctgctggcagtgtcagagcccggctttgtcttccaccacccctcctagaactggtggcagggacagatgaatggatgaatgaatgaatgggaagtgagaattctactactggaccatcaatgcagccctcggaatgagtgagtgagtgagtgagtgagtgagtgagtgatggaaagtggtctggaggcagggagagggacaggccgatcatgcgaggaatcccagcccaagcccccgaggtccccgctcccgccctaaaagatgcacgcgccaagcccttgggccagaaaaaaaaaaaaaaaacgggccgggattggctcaggctgggggaggcgggtctacgacgagacacgattttctattggcttactcgccaggactctgcccaatcgacgcgatcgtcttccccagaagacccccgcctccctcccgccggcggccgcggaggcggaagaaggcgcctttccgtcgccctagcaaccgtcagcggatctccgtcgcccgggcaactgtcccaggcctcccgtcagcctttgcctgggcccctccggtcactcggacaaccgctacccgttccggtcaaccatcaacccgtcccccgtcaccccggcaaccatcgccggacccacctacccctggacgccgtcctggtcctgtccgcaggcctcctcgccccaaacctccgccgcgggctccgacgtccgcgaccccacgtctcaggggctccctcctcctcctgcccgtcttctcgcctccccggggcggggggcattgctcctcccctggcaggggggccccgggttggacccggctctgggggtccctgctcggtcgggacagtgggaccgccctgtgctgtggccgcgcgcagccccccgcaggcttcggcgctcgcactcttgcgtgggactgtccaaccgccacagggagctcttcaaaatgcaagccatgtcccttccctgctgaaaaccctcccctggctccccttgagaatcgaatccaagctcctcgcagcccctggcgatctggctgtgtggcctcttctctgaagcctcctcgctcactctgccttagcaaggccctggcctgcgtgttgtaactccaatgacccaagcttcttcccgcctgggaccttcctagtcactacttcccactccaccaaaaagtgcatcctagacgggcgcggtggctcatgcctggaatcccagcactttgggaggccgaggtgggaggatcacttgagccgaggagtttgagaccactctgggcagcatagtgagacgtctgtctctataaaaaatttttgggaggccgaggcaggcggactgcttgaggtcaggcgttggagatcagcctggccaacatggtgaaaccccgtctctgctaaaattacaaaaattagccaggtgtggtggcgtgtgtctgtaatcctagctactggggaggctgaggcaggagaatcacttgaacccaggaggtggaagttgcagtgagctgagatggcgccactgcactcccgcctgggcaatagagcaagcctccattctcaaaaaaaaaattaaaaattagcctggcatggtggtgtgcccctatagtcccagctactcaggaagctgaagcaggaggattgattgagcccaggaggtagaggctgctgtgagcttacgtcacaccactgcactccagcctgggcaacagagtgagaccctgtctcaaaacaacaacaaataagtgcatcctctagctagggtcccacctgtgagtcttcagtgaagccttccctgagccctgtcagctctctcctccttaaactctttctggctcacactctgtcactaggacctagaacactgcctggtatctatgttgagtaaaaagatgttgtgccaggcgcagtggctcacgcctgtagtcccagcactttgggaggccgaggtgggcggataatgaggtcaggaattcgagaccagcctggccaacatggtgaaaccccatctctactaaaaatacaaaaatgggccaggtgcggtggctcacgcctgtagtcccagcactttgggaggccgagacgggtgaatcatgaggtcaggagatcgagaccatcctggctaacacggtgaaaccctgtctctactaaaaatacaaaaaattagccgggcgtggtggtgggcgcctgtagtcccagctactcgggaggctgaggcaggaaaatggtgtgaacccgggaggcggagcttgcagtgagccgagatcgcaccactgcactccatcctgggacagagcgagactccgtctcaaaaaaaaaaaaaaaaaaaaaaaatacaaaaatgagctgggtgtggtggcggacacctgtaatcccagctgttcaggaggcagagacaggagaatcgcttgagcctgggagggggctgcagtgagccgagatcgcgcaattgcactccagcctgggcgacagagcaagactccatctcacaaacaaacaaacaaaaaaaggatattgtgctggggataagggaggacagagggggatgaccagcaggcaggcctatctcagagacaggagaatgtatttctcagggcctctcagtcctcatggtacaggtgatgatggcaacatccccaaaaagccaggcacaagccagggagatacaagctgatgctacggtcagcctgagactgggtggcgcaccctccacatataaccgccaccccccacccatccccaccccagagggctccagagtcagcggaaactgtggctaatttggagcagaagtttccaggagctggagaggcaggcctcagatcccagatggcttttctgggagctggtcccttcctgcccggaatccagaatctcacttgtcctaacagagacgagagctgttttcccagggatctgagacaggccagcccaggctggggcaagagaacttgacctgaccaggcctggggtcatgacggggggtgagggaaggggcttgtgggagctctcctgggactggctggagaggaatgaggaatctgcacacccacctgcctgctcatgagggtctgcccttggggaggttgccaggggccaggcagggaggccccctgctctttttttttttttttgagatggagtctcgctctgttgccaggctagagtgcagtggcgcgatctcagctcaccgcaagctccacttcccgggttcatgccattctcctgcctcagcctcctgagtagctaggactacaggcgcccaccaccacgcccggctaattttttgtatttttagtagagacagcatttcaccaggttagccaggatggtctcgatctcctgacctcgtgatccgcccacctcagcctcccaaagtgctgggattacaggtttgagccactgtggtcggccctgacccctactcttaagctaggattaccctcatcagcgctgccacacacaactttcttcactgatgcggcaattgagcacttgaaatacagctggtatggccaggcacagtggctcacgcctgtaatcccagcactgtgggaggccaaggtgggcagatcacttgaggtcagcagttcgagaccagcccggccaacatggtgaaaccccatctctactgaaaatactaaaattagtcaggcctggtgacgctcctgtagtcccagctactcgggaagctgaggcacaagaatcgcttgaacccggcaggtggaggttgcagtgagcctagattgcgtccactgcactccatccagcctgggcgacacagcaagactctgtctcaaggggaaaaaaatgaaatacagctggtgggactgagcactgcattttcattgtatttcatttcaattaacatacatttaagctgaagtagccaaatgtggtcagcagtattgtattcagagtagcactgagctgaagacccaggcaggaggtcgaaggcagggacaggaaggtcagggtttaaggtctgtgcagctatggcagagaagcgactttggcaaagcgcagagtgaggccccaggaagggaggaggtgggacactcggtctcggcatctggctccactggaagagaggtatacccagttcccagggtcaaagtgtttgttacacacacatgcatccatgcctgtgtgtgagtataggggttggtgtgtcccgaggcacccataggtgcgcttgtgtgggatccaggagtcccatgcctatgagcgattcaagagttcacccatgtatggacattgtatggactcccaggcacacacagataatgggtgtgtgttccttcctgagtatccatgcctcctgggcaggccagcaaggaccactagtccagcaggtcttgcaagaaggcccacatgtactggtgcatctcctgggggttgctctgtgggatccaatgccctatgcctggcaggatgtgggcctccaagcggcccggcacaaagcggctgccgatggcttccaccagccccagctccaagtaagtgtccttctccccccacagcagcaatgtgggtgtggtcagctcctggggttccagggggaagttcctgtggccaggacagacagacaggcagacagacaggcagaaggatggttgcctcccacccccctgcccctgcaaatctcctgagcttatgcttggcaactggtctcacctgaagaggtttcggtagtagttgaggggcccagtgaggccaccaggctgtgagaagttataaaggaaggcctcgagctcgctgggggtcaagcatgggatgcctgtcttgcggtgggtgagggtggtcttcagaatctaggtacacagcaggactctggcttcagtgcccagcctgcccagccccgacctgcttccctcctcccttcaacctgcaccctctgtacctgaaagtcagacatagacagcagcttctcgggcagccagggcagctggaacaggaacatgtagtgggaacggaagaactggctgatgtggtgcagggaatagtctggggtgggagggttgggggagagatataaggcctgctcctggggtggccccatacacctgcacccctacacatacccaggtcagggacacaagcctcaggaatgccactgctgcctgcctgggtctgtgaaggtactagatacccctcctggcctgggcaccagctacattccctcctgccatgtttcactatccacaggatgggggcatctcctgggaacccccatatccaaaggtgtgcttcctctgcccaggccagggtgcgtttcctctgctttattcagctaacatttattgagcaactactgcatgccaggccttgttctagacacagcagtgaatgagacagtcaaaactccctgttcatcctaggcaacttaaggaaacccctgtatctataatttttttttttttttttttttttttttttttttgagacagagtctcgctctgtcgcccaggctggagtgcagtggtgtgatcttggctcactgcgagctccgcctcccgggttcacgccattctcctgcctcagcctcccggtagctgggactacaggcacccgccaccacgtccggctaattttttttgtatttttagtagagacagggtttcacagtgttagccaggatggtctcgatctccggacctcatgatccacccgcctcagcctcccaaagttctgggattacagacgtgaaccaccgcacccggcctccaaaaaataattttttaaaaattagcagggtgtggtggtgtgtgcctatagtcccagctacttgagaagcagaagtgggaggatcgcttgagcccaggagtctgaggctgcagtgagctgcaattacagcactgcactccagcctggaccacagaacaagactgtctcaaaggaaaaaaaacaaaacacaaaaaaagacacccccaaaagacaaaaaactccctgccctcagggagctgacagtctagatggggagacagacaagtaaacaataataggctgggtgcggtggctcacgcctgtaatcccagcactttgggaagccaaggcgggtggatcacttgagatcaggagttagacactaacctgggcaacatagtgaaaacccgtctccactaaaaatacaaaaattagctgggcgtgttggggcatatctgcagtccccgctactctggaggctgaggaaggagagtcacttgaacccaggaggtagaggttgccaggcagggtggctcactcctgtaatcccagcactttgggaggctgaggccggcagatcgcttgagcccaggagttcaagaccagcctggccaacatgctgaaaccccatttctactaaaaatacaaaataattagccggtcatggtggcacacatctgtagtctcagctactgaggaggctgaggcaagagaatcacttgaacctgagaggcggaggttgccgtgagccgacattgcgccactgcactgcacagagtgagactccatctcaagaaaaaaaaaaaaaaaaggggccaggcgtggtggctcacgcctatactcccagcactttgagaggccaaggtgggcagatcacaaggtcaggagatcaagaccatcttggccaacatggtgaaaccccgtctctactaaaatacaaaaaattagcccggcatggtggcctgtaatcccagctacttgggaggctgaggcaggggaatcgcttgaacctgggaggcggaggttgcagtgaactgagatcacgccactgcactccagcctggcgacagagcaagactctgtctcaaaaaaaaaaaaaaaaaaaaaaaaaagaaaagaaaagaaaaagaaaaaaaacaacaaaagagagagagagagcacagttatgaccacagtgctgcatattaacatcaggtgatatgatagacattgttaacctccccagcctcagtttcctccagctggaacatggggataatacaaccttcataagcccaggagccttaagtaggttactgtgtgcatattccttgttactgtaagtgctataaaaaaatgtggattactcctaagtgtattgtgatttattttattttattttatttttgagacagagtctcactctgtcatccaggctggagtgcagtggtgcgatcttggcttactgcaacctccacttctcaggttcaagtgattctcttgcctcagcctcccgagtagctgagactacaagcgtgcactaccatgcctggctgatttttttgtatttttagtagagacggggtttcaccatgttggccaggctggtcttgaacccctgggctcaagcaatccaccggctttggcctcccaaagtgcagggattacaggcaggagccaccacgcctggccatactttattttatttatttattttttgagatggagttttgctcttgttgcctaggctggagtgcaatggcatgatctcagctcactgcaacctccacctcccaggttcaagagattctcctgcatcagcctcccgagtagctgggattacaggcatgcaccaccaatgcctggctaattacattttttttttttttttgtagagacagttggggtcttgctatgttgaccagactggtcttgaactcctggcctcaagtgatcctcccacctcagcctcccggagggctgggattacaggtgtgagccactgggtctggcgtgtcattaatttccgaatgaggagttccacaaccgaagggacctgggttgattgctgcaccctcagcccctgatgtgttgacaggtatacagagaattgaaaacacagacacatgtccctgcccccttgcacataagtacatcccagtgtcccggactcccacacacaccttggtacaccgacatgggggcaccactgaccacaaccatccgctcgaccagggatgggtagtagatggagaaatgccaggcaaggagggcaccccagtcatgggccacaaggatgcacttcgagtaacctgtgggaattcaaggagctcgcataagtgaggtgcccagtaggactgaagcagggatgggggaagtaggttccagcaaggagaaagcgggggtatgcgtgtgtgcaggatgagggaggccacgcctaggatgggggtatgtctgcacccaggcctaggatgacatctttgatgtccaccagcagcaggtcgattgtgtagcagtccacatcccgaggtgcatccgaggggccatagcctcgcaagtccacagccacaacatggaagcggctctggaactcccggagctggtaacgccaggagaacctgccaggcgggcgagggagggaggctgagtcagggccctcaggttgcacctgcaccctacgcacatcagcaaccattggcaaaccctccttcctgctctaaacttcccctaaaaggaggatggggaatcccaggcagaggcagaggctgaggctgaagccagctacaccctgaatccagggaacttcaatcaacctcaatacccctttgtcctgtcccttcagggcctagggatcctgggtatgctggctcagtacccctatccccatctatgttcagcttgtcccgatctatacagccctcctccctgcctcttgggagcccaagctccacctgcccccgagtcccgtgggcctcaggcccctggccccagacgtaccagttctcagggaagccgtgcagaaacagcatgaggggtccgttacctcgtccagccgagacatagtgcagacgcaggcccgagctctagggggagggcacagcctgaagcctggggaaccctctctcccgaggcttgaaccgtctcgaccccacgcgaccccgcagccccgatagcgcccccgtgcgatcaccttgaggttcaggaaaccgtgctcacccagcgaggggtcgctcaggcaggcgggggacgcgctccgacggcgcccgcagcagccgcgccggggccggcacagcacgtgcgtgagcgctatgcagccgtagaccgccgcggccaccagcgccaccgagaacaccaggctccacatgaaggcgcgcagcagcttcagcgacaggcgcgacggcgccagcagcgcggtcaccaccagctccggcatgtcgccgcgctccgggaccacggcggcgctgccggccaggggcacctgcagcagcggcgaagcggtgtcagggctcaggggcccatcgcccttggcctggggcccctccgtgccgtcgggatttgtgggacgcgctgaaggaagaggcgggcggctccgacagaaaacagccagagcgcaccactcacctgagtgccaggtaaacacctgggcgcgacagggacaggaaacaagggtagggtgcggaggctggggaggaagaggttggaaaggggggaaataaatgggcggggcctagcaggtcctgtgcggggcttagggccggggcggggcccaggaagactcagcagcgggtgggtgagggtctaaaggcggcaattccgggccgggtgcggtggctcacgcctgtaatcccagcactttggtaggccgaggcgggcggatcacctgagatcaagagctcgagaccagcctgggcaacgtggtgaaaccccgtctctactaaaaatacaaaaattagctgggcgtggtggcgggcgcctgtagtcccagctacttgggaggctgaggcaggagaatcgcttgaacccgggacgtggaggttgcagtgagctgagatcgcgccactgtactccagcctgggtcacaacagggaaactccgtctcaaaaaagaaaaaaaaaaaaggcaattccgagcccagacaaaccttaaggaggggatcctggatcttcagttaagtgggcgacacctggagtgaggggcggggcatatgcagagtaggtgcggcctacaagccaaaaaggagaaagagttggaatggtgggcctggcttatgcgggtgggcggggagagggtggatcctagaggaggtgaggcctaacattgggcgaagaaggcgggagcctgggccaatgagctgacggtaggccggggagggggcggtggggtggggtgggcaatgggcaatgagacggagggcggggccgggacctaatatggcgggtcaggagggtctggaagacgaagaagagggacaggcaatgccaggtctaggactaggagggaggcgcgggcggtattagcggctggaggaggcttcgggaggcccggccgacggccgccgcctggtgctacccacccaggggcgcgcgaccctcccttcggtctggctccaaagacctagcagcactgacttcacccagctgtggttccaacggcgggtccagcggcctcggcccggcgccgtcctcctgctggcccaacaggcccgccagcccgcccctgtacgtctgtgattggacggcggcggccactgatgttcaagcgacaggtcctggcccgggagccaatctgcaggtgttgaggcccaggctccgagagcgggccgaggaggcgtggataccctgattcctagggggcaggcctggttcccccgaggaggacccggcctatgaatgactggagttctggggttctggccgaaagaggaagtgggacagggccgggtgtgatggggcctagagtcacagagccttgcggccctgctgtccctgcaagaagccagcttctggccaggcgcggtggctcacgcctgtaatcccagcactttgggaggccgaggcgggcggatcacgaggtcaggagatcgagaccatcctaacatggtgaaaccctgtctctactaaaaatacaaaaaattagccaggcgtggtggcgggcgcctgtagtcccagctactagggaggctgaggcaggagaacggcgtgaacccaggaggcggaggttgcagtgagctgagattgcgccactgcactccagccagggcgacagagcgagactccgtctcaaaaaaaaaaaaaaaagcagccagcttcttcctcctattttgcaaccttctcccgatatccttgaacattttagggacagccatcacttaaccatagagcaaccctattaagtctaagtagcataatcacattcctgtagtatagatcatgaacctgaaattcgaggatgaagtcatttgcctgaagacatacatcttgtaaaatagccatccgcaaagatgtagggaaaaaggcagcgatctgtggctacacctccccttcctcccggaagcagccactggaacgtttttagctttttctttttttttcagatggagtttcgatcatagctcactgcagcctcgaactcctgggctcaagcactacaacctgtagttgggactacaggcctgtgccaccacactcagctaatttttcaaaaacttttcagagagacgacttgctatattgtccaggctggtctcaaactcctggcctcaagcaatcctcaagcctccacctcccaaagtgggattacagatgcaagccaccgtgcctgacctttatttcttgacttaaccaatgtatgacatcagccactgacttgctcacatcactaccccggacgtgccgttttttgtttccctgttagtttcctttaaaaacactccacttgtcacctcttgcccctttccacctcccacttttatccatatacctttgtactgtcaaggctgctaaacattatactgtcctgggaccataactaagtccatgaagttgccacttaaaggtgaatagtggtttatgttctgcctcagtgaacaatgcatctcaagagccgaatagaccactatgattacattgcccatagtgtacaaacttttgttctccctggactacttaaccactacctttcttttgttgtgtgattagcctacatcaaagctttgggggtttttttgtttttgttttttttgagatgggagtctcaccatatcacccaagctggaatgcagtggtgtgatctcggctcaccgcaacctccgcctccagtgttcaagcaattctcctgcctcagcctccggagtagccgggactacaggtgtgtgctaccgcgccccgctaattttttgtatttttcagtagagatgggagtttcaccatgttggccaggctagtctcttaactcctgacctcaagcgatcctcccaccccggcctcccaaaagtgctgggattacagatgtgagccaccgtgcctggcagctttttcttttacaccttccattaaatcaattatctcacaatttgatgttcccaggatctctcccaaccgactccgctaatctggacgcatgggtggtgggtgtctggggaacctcccttcttcctctcctacacatcactgaccccccgccctcatctccccgcttctcccaagtctaccctcaaacaaaaagcagccatcacaggagagtaactttatactcagtacaaatgtttatttttgcaatgagaactgcacaaaaaaaaaaaaaaacctttcgtatgtaagtgaaaagtctacgaattcccttctacaaatgtctaaagtgtttaatacaagtctcagattcactgacataattattggccaagcgatccgtgcatacagtacagtgggggcttgtacacacctcttactctggtataggactaagatttctagtactgtgggaagggttgggaaatggctggagaaattaaatagatcccagttctaattacaacccaggtagagagacacccatcagggaggtgtggagaaggccatggctgagttaaatcttcagcaggaagctgcagagaaaactatccagctcagcagttggacccaggctggggaagtgtctgaacaaaacaaggaacaaaaatgagtgggtgggatgagatggaagaaaccccaaagaacctaaatacgtcacacttgaagtggcacagtggtatatgagaaagtgcctgagtgggcatggacatcgaagaagtggggggacctctggctggatgcctgaaccacaccctcacagggaggtttggcagatccaaagacaataaaggacctttcaggtcaaaaagaggggatgtaggagaataaacagtgctagaaatgtttcaatcagtttgtctctgcatacatataaattatatacttgtatcttacatcttaggggctcttcttgggcgtcacccgtgccttgtggctggggcatgtacatacacaagtggacacacaggcagagcagccacctgtgggctttcttggacaggaatgtgtgtgtatgtgcatggggggtgaggatcctattttgggggatgtagacttatatctaagagtatctggttaaccctgagcttaaatgaaaggaggagttaggttgaggcaggcaaggtgggagaagtggcccaagtcctttggtgagtggggggacaggatggagtaggggggacaggatggagtagggtggaggggaagaatactgtctggagtctggccagggttctgctagagcacaccctccacctcagccagggtccacaaggatgggtaccgggctctgcgtcacagcttcagcttggggtggttgctatgagtctgcgtggctcccgcccagggcagacagggacaggtcacaggagaggggctaggtaatccctggcagtagttcctgtacagaggtggtctggggtccagggggtcccctgggcctagcctaggcaacagttggttcacaaagaaatgtcagggagacgccagcattaaaaaaagagagatgtgtttattccatgatcagtacagaccaaatgcatattcaccgtatgaaagtcaaaccagtcagtgactccagagtttggccaacactgaggcaccagcgtcgtggtgtagagtgggttctcatggcacgcgtaacctcaccaggggctccaattataaaaattaaaaaaaaaaaaaaaaaaaagcatgggcaggagcggccagctggttggggctgggcgccaggtaggggagtctctgccttagtctgtggcgcccccagggcccggttcccacctcatcccttggcccttcctttctcagtaaaaaacaaaaacaaaaacaaaaaccaaaaccaaaaaaaccaactcaacagatctgacattaaaaaacaaaaaagccaacaaatgggtggggggggggggggtggaggggaaagaaaagaaattgtagctttctggttttataattaaaaatagactaataaagtttgaaactgagtaaaatataggcaggattttttttgtgtgttttgtctttttgtggatttttttgagcttttttcttttttcacaccagtttggtggagtcaccaacaaacttcaaacaaagatatgccaactatgttcactatacagtacagccacggtcacacactacccacagcgcggtggcagccgctgctcaatgaggagacgatcacaccatttcggagataagcagtgccattgtgtctggaggagaagagagaattaaaaataaaatagaattcaacaaaaaatatatatagaaaaaaaagaaaaaaaaaaacgaaacagaaacacaggtgggaaggaactgactttggttggtggcctcactccccggccgagggctacccacgcaggacagtcgcctcgctccggatgccatggacacacacacctccacggcactattcccttttgcacaagcaaacacttacagagagcggctctcaattaaaggcttgtgggggagggtcggggggtctgttcaaggcaaagtcagtgccagcgagggggtgggccggcctcgcccgcctccagcccacgcaggcctgccctggcctcctgggagcgggcggcgatggctggggtgtggggaaagactcccggcgggcaggacatcacgaacgtcacgttcttggggacagaaaaccagtcacggcggcagcaacgatgtcctgtgtatactgtgtagacatttggcggagagaagggcctctgccccgcatgtggggatgcagggcttgggtccagccggcacttgctcgtaacaaggcgtgtgctgagcggacgtcctgtgaggggtggtgggtggcgggacgtctgtccgactggccgtaaggcagacaggctctgcaatcctcagctgcccgtcaggcctgccccgggcatagcatgcaggagggccaggccctgaggcatcccctggccgctgatcccacctccaccaccgcccctaacactatggaaagtcaatgttttgccagaaaatcaaagtcagaagccacctaggtgcgctcagaaaagattttcttcaaatattgacaatagatcactctggaaattcatgtcaatggtagctgccatctggaggagaaaggaaggagggagtcaggaggatgacctagccaccctgcagctacaagccctcatacccgctaccagcagtcagccccgtagccctccccgtggctgacccctcatagcgctcaccccgtccacacagcactcagggccctacagctgagtccagaggaccacatgccgaccagcagggacggggctcccccgctgcccctccctgtccaggctccagtccccctttcccagctccctcaggagctaatccttagaccagggtccccaccaggcctccagactcacggcttcccggcgtcttcgctcctgctcccgcttccgggccaactccctctgctggtccagcatggactggggctgggagctctgggcctgtggggtggcggcggcagccaccgcagctgcttgctgttgctgctgctgctgttgctcctggcgctgctgctgctgctgctcctggcgccgacgtgcctcctcatgggcccgccgggcctgctccagcgcatcctcgtcctctcggctcctgggcagagggtcccagtcagcctggggactggtgtggccccaagagtccccatgccccacccagacacccgcccacctcatgcgctcctgccgcagccgctccttctccttctcagcgtgctcggcctgagccttcagggccttctcacgctcctctttctcccgagcggcgcggcggaactgctcgaagctgtcgctggatgacttggctgtggaggagggggtggtcggatgcttctgcactaggctggcccaggagcccatgttcttgattttcaggtcctgcagaacagagaggttggggtgggtgaggggtctgctgtgcctaaagggcatagctgggggtgtgcccagcatggcaccttccagggccaaggggcaagcgacacccatggacctccatcccaacctttttgggcgcaactggagtcttcggctcctgtttctgtttgtccttgtcaggggcccctggtggcggtgcgttctgctctgggggccggatcacaggcctcccgacatccacaggcttcatttccggccctggaacataaacagccggtgggccctggcccacctcaccccagtggggcatggtccaccagccccacagcaagcttatgtccaacacgggcctcggggggcctgagccctggctgtgggcagggagagcactcacgctggggcaggtggacgggggccttgatgctctccgggtgcttggggggctccggccgcagcgaggggctgaagggctcgctgcggatgatgggtgagtggatcttctcctccttcaccaccacgaggggctggggctggaccacggaggcagcacgcagctcctgggatggcacaggcacagcggccggtgaggtgggcaggcacccccggccctagcccacaggactatggcccagccctgccagttacctgtttcttaggctggacgttttgctggggtggagactggtgggtcaggctctggaactgtgacatctggggggaatgtatcataagcggggagggggcttcgcggaggtgacctaggagaagggacaaggaatgtgtcaaggggctggcttagaactgctggccctgagagaattgtcgggaaggaaaacgtgggctgtatggagaaactgcatgtgccgcccaggccctgggacaagggtccattagcccagctcaaaaagggtgaagacccacacaagtgactgggcctggtgaggacatgacccctccccgaaagggctgagtgccctgtgtccccctgcatgtggggcataactcagtgtgcagcagagctttctagggccctgtggcaccagtcctggtgtttgaccctcctgtgtgcatcagaatcatctgggatactgtggaaaacacagatcctgacacatgtgggcttggcagggcctgggccctaatactttttaaacccacaaagctcagcctgggttcctgccaactagcctggcccacctggatgattgcagggggtgcaagacccagtcctgggggtggggatgctcaggaccctccccacagtcctattccccactcagcctgcacgcccccacggaagagagaagcctggaattggcctccacctgcgccgagtggggagcaggcggaaaagggcctggagctgtctcttaggaaacaggccagcctgacacctgcatccaacccaaggctgggaaggatccagcagccacagggactactgggccctcaatcacagtgagccagcacctcgggactgtgcagctggagcagctgagtcctacccatccaacatgtggcctctctctgctggaatccctgcaggcaaggggcctcaccgctctttggctagctgcagctcgggacaagccacactgtccacagaggaggctgcccctctgcaacgcttttgctcccagcctagcctcatgcccatctccttccactgtctgtcagcacaggcacccttgggttctccaggagccctgctggctggaggcatctattttcataggcctggagcaaaccacaatgccccaggtgtggtagatcctctctagagccaggacccactcctaacgccagaagacactgcagctgcttggagcccacatggtggccaggcccatcctgtccccgcagcccactgctgtgtgtggctggttttcctggcgttgacatctcctccaattctagcacatcgggaccactttgggcactgccaattccattcagtgctggagggccccaggtctggcctgccagggatccacaggcacatgactgcaacagcctcccacccaactagggcagtgccttcagcacctgctgaggctgacctgggcaacggtaggctccaggggctgtggtttatagaaaccacctgcctgctggtgggttcagaggatggctcacggatgactcctgaaagctggctgggggcccagggatgcctgttaagtctctttgggagtctaacaacttggcttttggcctacaaagcccctagcaggatcccaatccacactgctcttgatgccccatcctagcctgctggggcttgggtcacggccagggacctgaagtagagctggctggagaagacctgcctcagccccgataggtgcctggtgcacccgagtgctggctcttctaaatgccttgcatcccctgtctatcacccccaacaggagtccagccctgcttcgcatgagaacaggcacagccgcacagctgccaggcccaacaccagtatttcccagggaggacaggcagcttgttcttggctcagggcatgcagagatccacttggcacctgactttttttttttttttttttttttttgagatagagtctccatctgttgcccagactggagtgcagtggcacgatctcagctcactgcaacctccgcctcccagactcaagcgattctcccgcctcagcctcccaagtggctgggattacaggtgcctgccaccatgcctggataatttttgtatttttagtacagatagggtttcaccatcttggtcaggctggtcttgaaactcctgacatcaggtgatccacctgccttggcctcccaaagtgctgggattacaggcgtgagccaccgcgcccggcctgcatccagcagcttttgctgggttaggagtaatcacagccctgcctcgttgcttgatttgcaggcagcacccggtacacacccaagacaggcagcaccatctacactgctgaggccaggaccctccaccctaaccctgcagcaccacatcaggaggcactgaccagaacatcccctgccggagccagccaggacattctggttactgacacttaagcgcccaggaaaagtgaaagggtgtggcctgaccaatgctgtcaatgggaaaagggtggcgtggactgggctggaggctggtaacaggcgatgaggacaggtcctgggcgggctctgagctgccttttgagcttccagctcagtgctccccacaccatggttctggctctccctgaacttcattcttcactctgctaagttagctgctacctgtctgcgatcactgcctcttggaagcatatcctgaccccctgaggtgcatcaggtacctcccctgggctcctagcttccccacctagcaagaagtcacctagcattgtcgtgctcctgactcaagagagggaccagaggggccttattctgagtgatctcacctcacaagcaagagagacacctgataaacacacactgtaggaagcaccaatgacccttccaggtccccctccaagctgaggctcagctctgaacccactgcagcctgaagcatgagttaacccttctggcttcctgaggacaaaactataggcccagcaccagcctccccagagtctacgggtgaggaccacttaccggttgagtaggggtccgacttgtggtgccggggtgaatggtggtgctggatgacttgctgaggcttggcaggctgcggcgggggtggctgctggcctgggggcggatgggggggctgctggccctggggtggcgggggctgttggatgtgggtggaaaactgcatgggctgcaagtgcacgggccgtggagggggctgatgctgctgctggggtggaggctggggctggggtggtgggggtggtggcggctgctgctgcagctgctgctgcacagaggggtggggtgggggcggcagggggggtgggggctgggactgcaccttcacggaagggagtagcggcgtagggggctgcaccttctgcagctgctgcaggtacagctgcatctgcatggaggtgaggggtggggcaggtggctcttcatcctccagcagcacttgggggggttgggccatggggggctgtgggagcaggggtgtttgggtcaaggctggtgacacggctgggggccgggcgggcttgggaggcagggcagcggctcggttgctgggccgtgatggctgctggggtagtgcgttgtgcaaagctggaagaacacaacaccgaggcggtgaggcctgagcacctgtggccccagcctggcctttctgctccatcctgacctcatctggactccagtgctctcctactggcctccctcaaactggcactccctccccacctaccgtggcctcccacaaactccagagcagtaaacagcttccagagagagctttagggcggtgtcatcctgccctatgctctgtgtccccagctcctgctccccatgctcacaatggcccttcacgcctcagtgcagaactcggtctctcacttgcccggccattccccaggcccccaggaaggtggccctgtccccatatcccccaggtgagtgctgtccaggttccatgggaggaatcccatctcatgagtgcatcccccaacccctgatgagaaaagctgcagaggggtcccagcttttcccatctaacatgacgcctggcccagcagcagaaataagtcaaaatcatctagattgttactcaaatgatgtcagtgttttagaaacaaaaatcttctgaatcaacgtgttaataactccatgcatgacctgtcttgaggcatctcctttaacttccaagatggcctcgagaagccacagatcttccctctagagaccagagcagctgaggctaagaagctgcccagccagagtgctcggacaccacatgggtaaaccgaggcaggaaggggtctcaacccacactggggcaggccacggctcacctggaggagagaccactgcgtgctggttgagatggggtggagtgctgtgctcaggcggctggggcaggtgagggggcagctcaggctgcggcaggtgcaggatgggctgggtgaagtggccgatggggtcaaagacgctgcctgggagctggggctccaggacgggcacctgggtggcaatgaagggtgggggcgaggacttcatcgccggggctgcctgctgcggcatggagggtgggggaggcgggggtggcggctgctgttgctgctgcggaggtggaggcggtgggggctgctggggaggcgggggcggctgctggggcacaggagccggggcctgctgcatctgctgatggtggtgatgatggtgctgcagacagagagacagacagacagacaggctgatgtcaggcaggcagaactggcccgggccagacccaacgtcccacctaatgaaggatgcccctgagcccatgtaccttcttctgctccctcccggggtgccccttcttttttgacttcggagccatctctgcagaggaaaagagaaggtagtgaggctctgggggagaaggtgagtgagctggccttggatgaagaaagacgagaaaacagggcactttcaggagaaggaccagtgaccctgagaaagggcagccgagttcaatgagggatgagttggtcatcacgggagagggagagacatgcgaggcatcacctacccacttgcctgctgcttttcctagcagggactgtgcctgaaaaagcctcccctgccaagcttcagatcaccacggttgcaccggaagctgagagcttgcccaacgcctcccactactcaagggtcagtcactcactatagtgactgagtgcatggcctggacagcaacctgctcagttttccaacaacctgtgatggttgcaatggtcacattcatcttacagctgagaaaagtggggcttcagaagggaggggacttgtccagggtcacatggctaaaaagcagcttctcgggggcctccaactgcatggccctctaaggcccactcctttccatcctccaaagggaagcagagaggctcagctggggctgagagccacaggacggtgaggaacatatcggcaagggaaaacacagagagcccactccgggagaaaaaaaaggagcaggctggcctcctgggaatgaccagctactaaagaggtagatggacctcagaagtccctgctttgggacacagtcaccatgctgcagacagaaggcagcatacgcccccactcgtgtgggccgacggcttggcaccacagtagggtggatgggtccagggtgtgtctgcccctgagaggtgtactcgagagccagcgtgcccacctctgtcctcaccccagagatttacactaagggacttttgccagttggatgtcccctcaccaaacatggatggtgtacaagccccacagggggacatgagccctggccagtgctcatgggctggcaggtcacagtcgcctgccaccagatgggaggccgggcccatggtatggcgccttttggattcctgtcactgagaagcacctcatggcactgcctggcttcgcctgagctccttgtcagggtgctgcctcttgctgctggtgttggaggacacatgctttgcccaaatccaggctccttccacttggatctgcttcgtggagggccacgctaagcttctgtgaggcacgtggccctcagtgcagcatgccaccaaaagggatggggaaggaccttgtgccctgtaagagctcaccactccacgccagacaagacacagacacagacctcagcagctacagacacacgtcctcgtacaaatgaccaggggctgcaactggggacacgggggaacctggggccccgcctaaaacctgcatacagggctcaggacgctctgggtcagagtatgacatctgatgagagagatactgttgtgggtgagacatgccagaagggaaagcttgagtagatttgcagtgtcagggcaacagggagtctgactgctgtggtggtggggggaggagcgctggctgcagaggttggcagccacaggaccagggggaccctgcacactagggaactgggaagaaaaggccagggcttctctcctggcacaaggaggtgatggagccgcgctgtctgggggcatgctgggcacaccttggaggggacccggggcagaaggcggaaggtagggggaagcagcagggccaccgtgtgaagtccgactaggagaagcctcagggatgtgtccagatatagagttgagggaaaaagtgtgtgtgcaagggaaggatatgctggggctcgcctgttgtctcgtggccttggaagaaaccttgtttttttggttgtaaaagagggatggtcactctaacccctcacagcctgcaggctgtgagcagaggcccataggagaagatgtagggacaaagcgcagcagggcctgtggggggttccagggggcatgtctcagctgccttggaaaggccacagggaatatcctgaggacttgtctccagggccccttgcaagtgctggggcccccaggcaaggcaggcctaaaaagtgggggagagaaggcggcatgtgcacggcagacccccaggaccagatgcctaaaggggctggtggtagaggtacccccttctggcccatgtggtctgagccttgtgtcagagttaccagtaaaagacaagacaggaagtgcacagcttcacaacacaccagccccaagacacccccacacaaaactctctagaaagggttacatgaagatggcctcaagtacggtgtgatctttattccatgacaatcttcaactcaacacaaatttcatctttacataggatggtaattgtacaaagaaataaaatgttttttaaaaatccgattaaaacactgattccacccaccccccagccccactccagtgaaggaggtaatggagggtaaggtcagggcagaggagaggagtccccatctgcactgagcggccgcctcccgcccctcctcaggacccacagccagctggtgcgtcgaggcccggctggcacttcctgcacaggaggctgccaacaagaagtgagtgggcactgtcctctctggctgttcctggggcaccaagcacaggtgacagcttaagtctaatgagctttcaagttcaacaagccctgaacgttctctgccagatggaagccccacgggcaagaaggacagggtccctggacagcgaggttgaaaggaccctggaggagagctggcttgtggctatggcccatgtgcacacgtgtgtgcgcgtgcgtgcgtgtgtcgggggcagcatgcaggcccgacactggtaatcaggctgccatttggtccaagaaagcagaatcttcccagaaagacaatgccagcagctccccaattgtcctgtgggaatctgggcatgaaggctctcctgcctgctcctgtctcaggcaggcgggactgcaacaggaacacatcaggcgcaggccaaagggcagctgagaatagtttgtttggcaaacagagcttaactggaagctggatgcccagaaaggatcaagagcagcccaggaactcctgagcatcaatgcagggccccgggaggccctggtgaggccagggctagcccctgcttccacagcaaatctggggcagttgcagctgctcaagcccaaggagctgaggagagctgccagagttcccaggcaggtggggagcctgcacccaagggcttgcccatggtgatagcccacttccagttccagaagaaggcaggcctctaggaagcacccacaatctacactttaaaaaaggagaaaaaatgaaaagcccctgaaacgcagatgcagttcctcaggggacttttcatgtcaggcagttttctgctgagatgctggatttgtgaccaaaaaagggctggtatttatttttagagcaaaaaagcctatttgtgtctctgggagggcttggatgatgtggccacactcgcctgccccaaccccaggggctgtcgtcattctaagggactgaagacggggaaaatgttcacactgttaacaccagtcagaggtgtccatggggcagtccctgagggtctgtgacaccctctctggtccaccagcccagactcaccccactagaggaggcgggtggggtgaggtggggttggggggatgataggcccaaggcccttcaccagtgcctgcctggcaggtcctgcatactgcagcctggttccaggaggtactttccctatgtgacttgagaagacggaggccaaagaaactggggaaatgcccaccaggcaacttaagcttttggaaatgcacgggaacaatggagacgaaggaggaaagactccaaaaggctcagagtcagcggtggctcgagccttacagggcaccagtgagaagcatgctgtgggaagagcctcactgagccttccagggtctagaggccttgcctctaaagctcccactccttatctaggacagctctagaggtcagagtgttcttccgcacactgaacgagagctctcctggactgatgtcactgcaaggttcaggagggaagtagttagggtccaaagtcccagaaaaagagggatgggacaaagagagaaaacatacttggggtctggctttgcacacagagtagcaccacatgaatgcatgtgttggggattgtcatcaccctccaggagatgccacccacccagaggaccccagagaaccaggaaggctgggcaggacagccaggcagtctttacacagagaggcctgggcggctggccaggcaggcagccttcccgaaggcgggactaggcgtgtgctgctggacatgactaatccaccccgggggacaggcccagggctctgaggaattccataacttgatggagtcctgtccctttcacggaagaaaatggacttaagctatagcttgctgggaaggaatctggaactgaagaccgttttattaagagtccgtgtccaatgattaggcaggacctacgtagagggagagagaaaccagtgtgagagaaatggtgtggaatgtaccatttaagtcacaagaacagaagaaccgcagactgagccaacctcctgcgccctggtggctgatgggcacaagaacggcactggagactggagccctgccccgtgcctggctaaccctgggtagggacagacccaccgcccgcttagaaaggtcacagaggcagaatgcatggatgccttggaaaccgcccccagcctgctcagcttctagagagtggccctggttcccactagcaagctccacgtgtgccctgcctgagcgcacgccggcatttcctttactgccctcaagtggcttcttttgaatttgagtgatgcccctgccctgtcccaccagccaggtgtggcaagcccaccaggcccctgctgactctgagctcatctcacccaggggctgtgcactgtctagtctcaggaaggcgatgccagcccttcctcctgggtctacaagaaaggaggtaccagaatgcaggacccccagtggaggggaaagagcaaacagcctcatctctgcattcctccagatcccccaaacaaaaagctcaaactctaaaaagcagaacctattatatacactgttgaggaggagaaaaaaaagaaaaagaaacaggctaaggaataaagtcttgtcctttctttccttttttggggtatccaacatggctccctggaccagggaggggcactgggcttgttcccacccacgtagcagagcggatgcctctgctggagtcacggatgcaaccgacgtgctactccctggcccctgagtgcgggcatgggaaaaacccgcccactggcggcctctcactctgggccacattccacaaggctcgccctcacccgcccatgaagccccagaatccctccagctgcaaatgctggctgtttgtggggggagtcacctggctgtgcagacagaaaggctactgccctatcttcaagtctcttcctactcccccacctccagggtcctcaccattcccctaggtaagcgccacactctggagcaggcaagcagcaggcctggagatggactaagtccctcaaagaccctgggggtcaggaagctgaggctggttgtgtggtaagaacgccccatggcctctgtctgcacttcccagctcaaatctttccaaaacatcaagcattcctttttcccctggagctattaagaaacacccacatgctccaatcctgggaaaaggaagccaggaaactaaaatagctggactgcgctcccgttccaactagacgaccagaccaaagcccaggaggatctctcacacctccctgagaccctgtcccagcccaggtagctgaggttaaacgggtattcctaagagggacataagctgtggggacacttctgctcacaaagacctgtgcatgacacttgggaagaaccagatgtcagctatgtgacaagtgaaagctagaagattcctaggacatgccctgccccatgtgcttggcagacctaaccccagtgctaatgacagcaaagccacagtactgtccacagcccacctgggacagtgtcttcctccagcctgctccacccaggtctgcagatgccctaggggtggtgggagagtggcatttgtgccctacccctgcctgtctcaatacagaatcctcaagcagctccaggctttagctggaatcacagctcaatggaagaccacagcccaagcaatagctggaatcagaggaagtggtagggctggcccactgcactgcatgctgctggggcagagggtggggaatacatggtggcctgggacacagctgggaaagcagcacccacccccgccatcctcctcctgcctgtgttccgttgctccctgaactagagcctggccccagaggaccaccccacgcctgcatcagtccacagcatcccggtctatggatagctaccaagaggggtgttcatgtatcacaccccccagcctcaatctagtgactccattcgttttcttctggtgattcatgtctcagggccgttgtcagcggaactaaccccgtagtataagtgacaaaaataggccctttcaggaatttcggctccaatccaaatggaaacacaagaacgggggggggggggggggcgggggcgcgggcctgcaaatcaactaggcaccaaaagaccaaagggaaataatgttcccccaccctgacccactcccgttaaggcagagctgcctgtaacgggccatggacatcagggctgccgggattcctggacccaggagagcagctgctgaaggagctacgccccctctgccccccgccctgagagtgcagagtcctgtgcgggacagggcagcagaaggctgtatttactggtgccagggtgtgggttcccatttcgggatctgccgtacgaaaccctcgcagcggcccctcctgagaggagaagcaccctgccggcccacgacagagctcactcagtgcacacagaaggcaaaggaaagcccctgctggccaggattgggaagacaaaagggagccaggcaaaacccaaggtggggagggcgcctgggaagaggggaaggccagagcccagatagctgcatgagcggccagggctggaccgccagagcctgggagcctgggagccagcggctctgagactgtaaatctcgccctccttcccgccaggacagctgttcccaggactctcagattacttgttgcacaatctttccacttttttttaaagtgggggagtgaaaaaataataaaatctcggcagcggcaggaggggtgtggggcactcgttcaggaaaccaggagcattcccactcctctcccaaagcagaggagcccagaagagggacgcagaggccaagggcaaaggccatgatcacacactggaaatcaggatgtgatggccacagccctctaaggtgtcttgtcttgtgagggctaaagcagcacactgccacgaccacgtcatgtcattttagttaatcaggtcccctgacaatttcagcatctggggtttccacttggtcactcagatcctcagatgagaagactacaaaacccctggtaggagaagtcaactagaaaacaggaggtgcaaaaacccagaggaaggcaagctggaggcttggctggcatggaaagtgaaaagtcagcggccaccaggaatgctaattggatccaagaatacagccattcaccccagtcactctgctgcgagtgggggccctagcttcgggtggcaaagccagcccttcctgggcagccatggggtgcagtgcctcctgctggctgatggattacaaaagcagtgtggggagagtaacggttagagatgaaagggtgaaggatggcgacagggaaggccaggaggccagtgagctgcccacggcattctgcatgcagttgtggtagagaatgtgggcatctggagtcctggagggtccttcagcccacttcaaggcaagtctcctcactcacctgggaagcagagggcaccaggctgtccaagggaagaggaatactgacaaggcccgaggtgccacctacccccaccccatctgtgcacacacacctcagagcaacatggctctccccagctgccgtgaagggtcctcaatcttccttggcacgatcaagttatttacatgcactgattattgagggttagcatttatttctagttagaataaaatcccagggatgggacaggcccgtgggagaacatgcaggagtctactgccaaaacacaggtttcccactgtggatccccactccccagtctgcctgagaccctagggccagctctcaggtggtctgcagcacgccagctcactgacagctgcaccagcctagcggcaaccccgttggccgtaaacacaggatgttagctccatctctcagcaggggctggtcgccaggccttctgggcaccatggctccctccctagcctctcccctgcgccagcctgagcatctgcgcccctgagaataatgaggaaagtgcacacttggaggagagcagtcccctctccactcccacctggcacccagcatcactacctgcctccacctcccactgaggctgctgctcagaaggtgggctctaatggggaacccagggtccaacgtgcagacccacggggcttgaaaagaagggactgttagttagaactgcaggagggacacgcaagtccaggtgcgtgtggagttagggcagattcaggagcagccaacacagcaacgagcacactctggggaggggtaggcaatggctggggcccaggtgatggcagggccagcagcagactggcgatgcggctggccagctgcagtctgctccacatccaccagaaaccagcgaagcatctccctgaagcggccgcactgcacgtgactgtgatacggggaaggccctggggacacgaagtctccactggtgcagaaagctgggtgtggtcacatcaaggtcaacagcacagcctggacccccacgcccacagtcctcatggcccagcttccccgcccaccatccagggctccgcagtgtcaacgcccttggccattcatcctccatgaccagaccctggcagggagagcataacggccaggccgagagaatggacactactgcacagagtgcagggctattcatggccccagggagacagttaacaaagagacagacagacagaggaacccagcaagttctgggagtgccgtctctgggctctagcatcctggacacaggaccgagctagtgccaggcacaggtgggaagagtttggtaagacacgtagaacacaagtcacctaacctgtttcggagtcttcgctgtcagaggagctggactcactggagctctccgactctgaggacgagaagcccttcatcttggaggagccggcaatcacatcaactttctcagctgcaatccaagcaatgggagctggtcaggcagggctgtggcccaggaagccgctctaagccatgggcacaccccatccatctggaggaaggaccagtgaggagcctgtgcacggtgggcccaggggctgctcccaactgccagctgccactcccagaacccacgtggtcccacagttcccatgggtagactgcttacaatggaatttcaaggttccttcaatctctcaaaaagtctcctttggggggtttatcaaggattcaagagaccaggcagaaggataatttcctaacacaaggtaccgctgggcataaggcttggattctcccagttactcttctagcaggggaagaagaagatccaaaaggaacatgctgccaaaaggtaacgcaaggcagggagagacccccgggggtctctcagcacagctgttcagacgcacgctggaatcatcatgtggtgtgccccaggtaggggcccaaggaccccaggagctagtcagggctggggacaaagactgtgtgcaatgccctgacaccgatcctcagaggaaagccgtaggccaggatgagctgtgtgacacaaaagagctgcctggaagagtccagaaaggatgccacaccgaactgtccctgctagagagggacagaggctggctcagtgctgcataacgtatcggtacacaggtcctgggaccctgcagacccgcctttcctccttccccaaagaggccggaggaagactcagcagcaggtagcctgggttgaaagcagctccggcttagaacacagctgcaggcaacaaggtgcagagaggccccagacaccaccagtcagatatgtagaaaggcactgacagcctaggggtgagtgcaatgtcacaacctttcggaggtttctgtgtcaagaacacagatattataattggaaaaaaaaaagggggggggcgcagaaagagtggactgagcaaggagggaaaagttactctgagggtgcccacagaaggaaccccatgcccagggggcccaagcacaccttgaggtttccttttcttccgcaaacaggaggtgacatagcgctccagctcacgcagtgtggacggcttcagggtctcaaagtcgatttcaatctcgtcggggttggaattcttcagggagggctcccgtgactggatgatgtgcaccacgcggcccagcttctcgccggggagcttgttgatgtccaagctgagctgccgcttctcctcataggacataggcttgcacttgtcctcttcctccgactcatacgtgggagggggcttgctcttcatgggcgctggctccttcttgctacgaagggacgatgcagacaccatcaagaacgggccccctgaggaagccaggcactcattcctccacatgtatgttggggggaaggggtgcccttcccataccccccacccaccagccttcacaggaaacggggcatgggcaactcaatctctgggagcacccagtggagaccgaagcaaactgtgactggaggctgcccaagtgggggatgcactacagccccatccttgccgcctatcctccccaaccaaacatggtgagctccgaaggctcatcctacagaaagaggcagagacagtgcagctaagtcctgtgtgcaagtggccaccagcctggcctgtgaagccacggctgcagaggggcagcctccgcacccaatgaggacagggaggggcagtggcccacacagtctcagagcaagccctggaaggagggtccccacccaggacaaattcaggggacacagacctcacattgctgttgctgctattatttttcttcgtctttttaggaggaggttccttggctttgctttttttattctcttccacttcctctttccttttgtgcttttcttttttcttttccttcttgtctttctcctttttctttggtttgttctgctggggctgagagagggctgcaagctgctcgtgcacggctttgagctgtagaccagacaggcaagacacacactcagggctgaaaccaccttcctgtcacccaagacccaggcgtctgctccaaaaaacatgcgacagcatgcacctggggcatcagggtgtgggcataggggaggcaggggaagggaaggcccccagctttgcgcctgtcatgttaaccagattcctaacaagactatctccacccattcactcaactccaaagactgccagtgtcttcctcaccagaggagctgatcaagccgacagacaccaagtctcacggccatcctgatcgcagaaggagggcccctaagaatctaagtaagagcacacggacacgtcaggcacgaagggcctgatgactggctatagggagaggagcaaacaggtagccccaggagagacgaacatcctggctcaacctcctccttccagatactgaaaggatcaagccacctcctctctgcccagaaaatggccatgtccctccccatccccaaccgcaagctcaacacatatatcatacatacgtgtatgatcaacatgcatttgacctagcaaaggggaaaaggccacaggtggtccagtgggaattatgctcccttgggaactcagaaccaagaacatctcttagaaacttctggggaggccaccctggtccacggactctggggattaagaatggagccaccaatgccctcacctgctcctggagctcagccagccgctgggctcgctcctcctcagagtcatcagtcgaactgtcactgtccgaggagctatcgctgctgctgtcgctggatgagggcggggccacaaccttggtgggagggggcactgccggggaggacacggccaccactggctcctcaggctcgtccggcatcttggcaaagcgcatttcgaacacatcctggtgagggaaagacatgctgtgacggctgctgggtacccaggccgcggcctagcatcacctgccctcattggctgctggggccaactcaacagaaagcaaccgagggcgaaagaggatggtgatcctgtctctttgctgccgagacaggggcaagggccagccaagggcctctgacaactcttgcaacactcttctctcaaatctcactttgaagaacaaggtggtccagagatagcggggcactcactccctggaggacaccgcccaggcaaggacatgagacccaggccactaagacagccagctcactgaagtctgagatggtactggaccaagggcatcctcaaaccccaaaacagttagccgaggctcccaccagatgcgtgcgggggagcaggagttgtctgtggtttgagagggcattccaggcagaggacacagcacacgcagaggtccccggtgggaatgtacctgccacaagcgcacctcctctaggggactaggctctgctgtagcagacacggttctaagtcggtctcctcattcctcagatagcccctgcagcacttaaccaagcagggctgcaccactggaggaggcatctccagcacacacaggacaaggtaagagaggtttaggcagcaggtgtggggcactgaggacaggctacaggagggagccactgtgcgcaggagaccctaagacctttcaaccctaagatccagcaatcagatggaaccacgtggggtcatggagctcagggaacagcagccatgcatggacactggggtctggccacacatactgccagccagctgtcaagtccctgccctaccccgggggcgctgtgctcaatccagtgatggctcaagacagaggcagaagcacaggcctggcttcccagcaggattctgggacccgcttcaaaccaggaataaactgatcatcgtggaaacacaccatggcaaagaccttcccccaaatgtgtgtcagtgcttcagagaggaccacggccctggaatcccctcctgatggctcaggaaacactccttgaggcttcctctcccacgctgctggagcaggcatcccatataactgtggtgttgattccctcccctccaggacacccggagtatgacttcttttagccaataactttttttttggagacagtcttcacccaggctggagtgcagtggcgcaatctcagctcactgtaacctctgtctcccaagtagctggaattacaggtgcacaccaccatgcccaactaatttttgtatttttagcagaggcagcgttctaccatgttggccaggctggtcttaaactcctgacctcaacagatccacttgccacagcctcccaaagggttgggatgaccagcgtgagccactgcgcctggcccaataacttttttctttctttcttcttcttcttctttttggagatagggccttgctctgttgcccagggtggaatgcaatcaatggctcaatcatggctcactacagcctcatcctcctaggctcaagagatcctcctgcctcagcctccttgagaactgagaccaccatgcccagctaaatttttgtgcagacagggttttgacatgttgcccaggctggtctccaactcctgggatcaagggatcctcccacaaggtggtctacaatgaaaagtgccaggattacaggcatgagccactgcacccagcaaatacctttattcagaaataactccttgagcaggtctgagacaaggaagaagatacacaacaagggacgaccagaggccatcaccagttagcctcccaggagtggggcccagggaggaaaaggtggggggcttcacatcagagtggaggccccagtgagagagtaagacagatccctagccctgcagcacccggctacgtggcaggtgggtagtgccctggatgtgggtgggctcaggtcccaaaatgactccaagaggcagctggggccacatgagcttctggaagagccaggcctgctgccaagcagcaggaagcaggttagagaagtgggcctcagaagtgccaggacatcatgaagggagataatcagctatgcctcccaggacaaagggagtgccctctactgagtggtagctacctcagcgaactggtctgtaagcctgggccagcttcaagacttgaggatgtccttgttcctccccaccaggtgatgactgttgggtaaatgctggggtgggggtgtgtggcattcactctgaggcctccttccattccctgggtgctcatggccctggctctccaaaggccccaacaacaaagagcaaaaaatacaagacacaaagtcagctaagatgagaaactaacattggtgggactgggaactgccagcttcctggcgtgtccagttgtgtgaccctgtcatccttccctgtctcttggatgtgagaactcttgttgtagcctgagtggggggcatcctgggaaacccacaagccagtgggcccagggctgctgtaggaaaaccttgctgtgtggcttcaacagtcacaagtctccaagtaccagcttgatggtagacaggaatgacgagctccctgttcaaggagctcagtctagctggaaacagaaaggtgaatgaacacatgggcagcaaggggttgccatgaactggaagtgtgctgagacctaagagtgaaaagaacacagtcaggggtgctatggggccagcaagaggacagtaaagcccaattcaagatgcaccgaggcaagcctctcacaagggaggatggtgatggtgaggggtagcaggcaccagcacccgccagggaacaccgagtgcaggcattctgttgggctgacagtctcttgagacccagctgaggcccagccccctgcccggcatcccacagacctacacctcactcctctggaggtctgggtctgaggtcatgcttctcagtttcagcacacctcactggtttcagacaagtatctcagctgtcaggctgtggaacacaggttttctcaatgacccgagaatttagaggctcagagagaaaaataaagtggctccttttccaagtaactttccagataatcccacttcttgggcccagccaaattaagagacccaattaagcaggtcccaatagctcctgaagaagtgagcaagggctggaagctttgtccctccccttccctgatggagaatttgctctctacctgctgatgcagagaaagtagagagaagtaagaaaaacaaagcctgaaatgccacaaacacaactgcccactgaagagaagcctgctctggaaccctccaccatcaactctgttgctcaaacagaaacacctctaccaagcactggcagagaggtgtccctcccaagggcaggcgaaacaggctgggccagaggcagcccacctacagcaccccccaccccttgcctgcactaggcccccttgagattgaggcctgtgtccactccagtccggcacctggagcccgtgtgtaggaagaaactctactgctgcagtgtctgtggtgtgacagacatccagtggccttggtaaactctacattcaggcaggcttactcccctctcagaaggagaaaaatgcaaaaaaaaaaaaaaaaaccacttaaaacccaaaaatctttgttggagaaaatctgcgaaaaggaggtggctccagggtgtcaggagaggacagaaaaaatgagacaaaaatgaggaaggaagggctagaacacatcagagggtgctttttcttttctttctcttagtaaagtagctcaaaacagtcacctttggtgctggaagagaatttgtttctgctgagttcttcctatgagagtagatgaagggcatgggtatcaatgtgagcagtgtgggcaaaagctgcgcccctgtcttctcaagagagtgggagagagggagcggtggaggagttgaaggcaccaatctgagggcgccactgccaccgggtggccctgaacaaaaactgcattgaaattaaaaagtctggccgggcacggtggctcacgcctgtaattccagcactttgggaggcccaggcaggcagatcatgaggtcagaagttcaagaccagcctgaccaatcggcaaaaccccctctctactaaaaaacaaaaattagctgggcgtggtggcgtgcgcctgtaatcccagctactcaggaggctgaggcaggagaactgcttgaaccaggaggcggaggttgcagtgagctgaggtcgtgccactgcactccagcctgggcgacagaaagagactccatctcaaaaaaaaaagaaagaaagaaagaaagaaattaaaaagcctgaactccttcaaggatgggaaatgcaaacatgaatgatgaaggggcaatgttgtttgtgaagaaggcacacagacaacaccaaagtgaagagagggcaacaattccccaagtcacagaaaataaaactaagaaacaggccaggtgccgtggctcatgcctgtaatcctggtagtatgggaggctgaagcaggtggatcacctaagcccaggagtttgagaccagcctgggcaatacagtgacatgccatctctaccaaaatacaaaaattagccaggcatggtggcacacgcttgctgtcctacctgagaggctcaattgagcacagcaggttgaggctacagtaagcagaatgacaccccgtttccaaaaataaataaataaaaaaaagtagaaataaaaagctccaagcctgagcatgcatttaaataacaagagccacatccacactagtaagaaagagaccaacaaacttcacaagggaagtgtttatcctacctcaagagtttgagcacatgtcctctgaacccaaggcagcccctgatccacagagaataggagagacagtgccttaggtccagtgggagcaggtacgggctgctatgctggggagtctaggacaacatgagaactagtgcagctgggaggcaggcaggcagtggggctctgcctggcaccgatccacaggtcaccaaaggctttccaagtcctcacttctgccctggaagcagatggctgcgacagccaggtgtgcagaagcccgctgaggcctacaatgagcacatcagcacctcatgatggctctgaccctgagaacagaagcaacccatggccttggggagaagatgctgggaatttttatgatcatttatctacagtcttaaagaatttaaaaaagaagatgagtctctaatcccagcactctgagagtccgaggcaggtggatcacttaagcccaggggttccagaccagcctgtgcaacatggcaaaacccatctctttaaaaaaaaaaaaaaaaaagaaaaaaaaaaagaaaataaacgaggcaaaattagctgggcatggtggtgcaagcctgtagtcctagatactcgggaggctgaggtgggaggatcgcttgaacctggaaggcagaggctgccgtgagctatgactgtgccactacactccagcctgggtgacagaacgagaccctgtctccaataattaaaacaaaaaaaatagaaaagatgatgatgatagtactaaatattgactttattctccaaaatttttaacccaatcttattattcaaagaaagtcattttttaaacttaggtatttttccttttttaaaaaaattaagtttacacatctatgctgtaacctcccctccccgcccacacgtgtacttcacactgtgcaccacccaggctctcaacttgaaggaagtgacccaggacccccaatcagaattgtggccatgtggaaacaaccactctgcagctagaaggctcttacggctctggtggagggatgtccacagtgcagatgtcctcagctcacgactgtgacagcgacttctcggcaagagtgccccccacccccaacccacttgagacaggtgtgttttgtagaagagactgggccatgcacagcacacacccggtcttccagccaaaagcaaatgagtgctggtggagggggcttgcagtggaacacccactctgctttaattgaataaccccaacttaaaatgtatgcactaggctgactttaggcacttttctaaagcaacatggcattatcccaaggaaagtgacagaaaaaaaaactctgccaaggcccacagaagtctgctcccacgaggacctcagcctgctctgctgagggtggctgcgccctcccaagcctcacctggagcttgcgggccatggccaccacctcatggtcaggagggttgtacttatagcagttggagaacatcaatcggacgtcagcaccaaactcctgagcatcacggtactcacgggcctccagtttagactggaaaacaagacaagtccctgttagctgtgtctgcccatgtgaccatggagaagtggctggcagcagacgaaagggatgcctagaagagcaagttggtttcttggctctcagtttggtcaagactctagtggggggacaggccatcaccccagttctcagcctcagggctgggactggccctgccaacatcccagctcacctgcctggctcgcaggcaggtggactcagaacccacaggaggcggagcctgagccagaaatgacggggagaactgatggagagggctgggcccagctcatcgtgatgacacagtacaggagctggtcaaagggacacagcactgttccctgctctgcctgccccatgcttgggactccactcccagaagaagaaacacgtaacaagtcttaaaactaaaaaagcctcaaaacactatggtgaaaatgtcggcacttacagcgtgcctccaacacagaggagacagcaaggccttctccaccacaaagaggctggcaaggccgccaagccccaactcccatggagcatctactgtgtgggcaaggtacctggggcactgggcccccaaggccagagggcttgtcttgcttttcctcagactaggggaaggggcagcacaggcatctgtagccacaatggccaagcaccaggtctcagagcacgtcccacagcagacagcagggggcgctgagtttcttcgagttggcgggaaaaatccacgcagccaccgttccagggcctgggcttcctcttggactaaaaggtctaggaaggttctgatgtggagggacagcctgcccaccttgtcccttccctcaggcacatcccgctaaccttgattgtgctcatgtccatggggtgcttgatgatgtcacagtagtcgtgtaggcccagtgcctccacgtccacaggcttgtagaagggccaggcgtaggcggcgtgcttcttggcaaacatctccttgaggatgccgctgcagcacttgagctgctccgagaccttgctgctcttctctggtgctgggtgctgctgagagtcgggcacgtccttctttggaggtttcacaggccggctgctctcccgccgctggcccagcttggtggtcttgggctccgggggcagcgagggtggctcgtgaatggggtcaatggtggtgggggtggtggtgtctgctttcctcttcactcccttctttgtctgccaagaacacggacgccaacaggcacagtcagaagtggcagccggcacagctgccctcagggtcacccccaaagccaggccctgtcttggggcccatcgctcacacagaatggacccaaagataattgcacaggcaaagggccaaggacaggcagatcgtgtcccaccactctgctctgcagctgggacaggacctgcctgtggcaggagaaagcataaaactgtgtgctcacttggaagccaagggacctctggaggctgcttagtacctaacaccagggcctctccccaagtgcccaggggaggcacaattcagagactatttagatggcccatctgcaaatatgcacagtctaaataaaagaggtgcagggggcaggaacccactaggaggtgtgacacaattatgggacctttgagtcagtggggcggctgtttctgggctgcaatttcaacacagcaagatctccccagaaacacccaccagtgcccgggacccaggacaggctctgtgtaaagcacgggcaaggacagggccgctctcctccctggtgaagcagccctccagagtccaggagactcaccttcacaggctgtggggtggccgcgatgatgggtgggtggctctgtacgggctggggagctggagcgggtgggggttgtggctgggggggcactggcgggggcgtctgcagtggctggggaggcaccactgtcatgacaggggtctggacgatgaggtccggggtgacggcagggaaggggtgaggcgtggcctgcacaggaggaggattcggctgaggggtctgggtctgcggaggagtcgatgcttgagttgtgtttggtaccgtggaaacgccaggttttgctgtccctacaaatcataataagacggcgagttagagaccatgctgacatccacatgctggctgacctcgtggggacatacaccacacacagtgaacgcacattcgcgtgttgcatttgcctgagagacgaacatcccagactccactctgccaaacccttccacctgtccctggggctcaaagaacagcagaaaaccgcacttcccatttcctagggcgtcctggctgcaactcccaactcaggcacaaagaccccttcatgaagcctggaggcccaggctcaaggagcaggaagcacatgctgacaggggacagagagcgggaaaacactcctcagagcttccaggcacagctgcccttgttcccagaagcactgccttctgagtaagagcttctggcagggagccggcagtagccgcccttgccaaggtttctggaaactggcaggcccccacctcctggaaccacagggggcagctggactgctgcccttcatgactggctcgagcgctgcctcccagcagctgtgcaggcagtccgaacacacaatggtcacgtggcacacccaaccagctgcaaaaagtgaggggttatggccagagctctaacaaaactgggtggaccagggtgagaatgtctaggagcataacctgggtcaccacatccttcgtgtgcatgctggctgccatgaaaatggacaaagacacccagtgccttcatctatcagctcaagcagcacccatgttccctgtgcatctcaaggagcaagggtgagattctgctgagtttcccaattctccttcctcaggcacaactcctgggcttctcccagactggaataggagatgccaccacgtctgtctgcccagcgtgcagcccaaacccctggtcccagggagtgaggaccaatatcctcatgtaaggataagggatgtgacttacatgaggatcaggaatgtgatctgataggtacaagagccacagggtgacacgtgagactagttctccttggttacctttgggtgcagcaggggatgtagcaaccccctttctgccaccacttcagaacagcatgggaggccaggtgaaaggctgctgctcagagaagcaaacaactcacactcagggaccacctcgcaaatgtcacccttctgcagcatggagttgcaaaggacaagatgtagccagtagctgctggagagtttcctagacagaatcatttcctagagtgggcagctctgccagctggcccctggaaccctgtgtcagttgggggtggtgacaggcagagatggatgaggagggctttcacttcagatgactgagcatcagaagcagggataactctgacaccagtgcattaaggtaattccaatcacaaacctcaaagtttagaactgagatgttagttaaaatgatttctggtcatgttaatgtccttaaaatggaaaagtaaaaaccacctatgatactggcagggtgaagtgttcaacaaacgtcaaagtgctttgagaagttacactttccttttaccctaagtccatcacctaccctcagaaaaggcagggcccaattatttctgcttagaagaggccacagggccacatgaccctatgggatggatccaacaccaaacccaatctcacatgtccaaacaccaacacggcatgcagtatataatgtcacatcctcctgccactcccagccccccaccaaacttggaaaagggacaaaggtcggggagaaagccaatttacttgctatttcagtactctacctgtttctttcctcccacgtcctcttccttttgcctggactatcatgatctcggtttcttctgtgggtagctcatttattttttgcaagaagagcttttccagagcttctgccattaagactatgtcatctccaggctggataaggagacacaggggtagagtcagagggccctcccctccccacctctgtagacagggcaccccatgccacccaccccctgcccccaaaacatgaagcgtcgtattccgggtccttccccgatctgcacccaaaggagccacaatggctacactaccaggtatcacagaggcttgtgttcccacaggtgtgctgagcctacacttgtctacctgcacctccctcatcttttaagctctggcctatctgagaagccatcctaatgccttaagcatctaccaagctcagccaatcactgaaaggggccctcctttgacacaattcaatttcaccagaaatacgtgaatgacacaggatttcttgccatgatacattagcagggccccagcaatgctccccaacgtacccccatggcagctcaccaggactctgggcactgcacatctcacactagttgaggggtcccactctgtcacctcatctataacatgctgttcccactcagttctaaactgagagcctggtctgcacattttgctcaaacctaagtggtgagagctgagactttaaaaaacacagtaaacttcaagaaactcacctacccatctcttctgggcatttttacccactacaccagcagaggtcaaaagctgagttctgtatagtgtctccctccagagtcgttctatttgaaagggttgattttaatcacatctgtggtctgaactgtaaacaaatgatctggcttcatggcacagccgagccgaaaggtttggctacggggttaggaagtgaccttcaggtctacatgtaggatcggggggacacttcatctatggccaagagttattgacagtcatgtccacagttccagcagaccatcacccacagagcaactgagctctgcgccggccccatcacaccctctctcacgtggaggtctctgtttgggcacacctctgcacaactacattttagcaggctctttcctaacaatttacatcacccaaatggactttgtcatgagtcgccactattctcctcacaccttctctactagacatgctcaggaaccaaaatcccaagggcaccagaagcacatgcttcaggctaacaaggacagcttgcaagttcaacatggccagcaccctcctcccagcaaaaaagcccacacccagtcacaggaacaaccacaggtctcattacctctacctccaagggtctcctcttgccagactccaagcccagccacacccaacacccctgcccacgggctcctgacatgcccactgccgtcgcctcccctcctctctccccagggcagctggacacccacccctacatctcaccttgttgtagatgtaacaatttgtaaacatagtgttgaagtcctggatacattcctgagcattccagtaatagttgttttccaagcgcttctttattgttcccatatccataggcgttttaatgatcttatagtaatcctggagagcagagagcaaaagtccagtgtcacctaggcagccaggcagcacaaacgctgggctggccaggctggcctggggacctcacccctggctgctccacaggtaaatccacgggagccacagctcctactggcatcagcaagtgatcttgagggggaacaccaaaataaagtggagcggggaagggttcctggatgctggggagtaattcagagggaaacgtacaagtttccaaccactctatcttgaaataggctgccttcattgaaatgcacattttttctttttatggatactaaaatattctttcacttttaataaataagggggaaaccaggcagccttttaaaaagcaatcctcacctagtaagacaacccatggcaggtcctacttgtcccatttgaaattttacatgtccataaaatgcaaattcccctggcgccaatgctggagtccacttgtaacccttgaccctggcactcctgcctccttgtcaccatgaagagctgcggagcataagtttccacccctagtcaaattcactggacttaacgtttctttcatttgcacacagtctaccactaaggattctttagtatccagatactgctgactgaccaggttaactgccaaatgacaaatctggacagccttcacaatccttagtttaaaaaaataaaaataaaaaatccaccatcccaaccctcaaactttcagatcttactaagtgccaaacagaaggagccagataacagatgtaaacgtcttaaagtgcccgaaatcaaaccacgttattctcacaacttcttctctaaatctaaacctattctaaaactaagttcatttttaaaaacaaccacagaaggaatgtgcggacagatcaagcagtgcctgggtttccaggtgtgaggatcacagagggccaggcagggggctgcacccagacagcaagtccccaatgactagaccagctcaggctgttggcctgacccaccgatagccaaactttctgagtcatcactctgactgaggacaggtgctcctgtaattaagttcaagtggtgtatcagaaccaaatccaagtggagtcccacggtagaggcacaggctgcaggtggagaggctgttgcagggagaagagagcaggtatactaacagcaagcactgaggccctgctcgggatggtagtggacagcgttggaaaggccagcacagggtatgggtgtggggtttttgagatgttctgacatccacgagaaagagtcaagggccacctgcttacatgtaaggttttggcacagctcatggaactgccctgggggtgagggctacaagtgcacacccaggcaccttaggcaagtggtcaagaggggagactggaagcagactatcggtgccactttctatgctctgacctcctttcccaagagaaccaagtctgaatagatctatcccagtggaaatttaaattttattctatggccaaaggccactgaattggccacagtgtgtcacatgtctcaatggccaacagaatagtgaagaggaattggggtgaaggcagagagaacggtgggggaagaggaactgccagcctggatagtacggtttggggccatgataggagatcaaaatgcgggtgaagacctagaaggcatcagaaaacagacaaggaatactttttagggtggccttattaacatctcctgaagaaggaagtccccagaatacagatttagcatgatgatgctcctgatcaagcatcccctttggctcagcccccaccaaatgccctgagaccactctcactcagcaagctccttcctcagctcctcactctcccatctctgaagacatcagatcagggccaccatggatcagtcccttcttcttatgtcagagctaatgagggcgacgtcaacagtcatagggacaggtagattcacactctgcctggaccaagaacgtcctggccactctccagcctgcacttcagagactgaccttgaactcccaaaccccatggcctaaccaatcacccatacttgtctgtcccgctggccagcactgttccctcaacctcaactgggatgctgctgcttctcggcaatctcaagtcccccagcccttccttctcctgtcttcaccttctcagccctccctgcttcagttcccactgcgttttcttgtaacaagctgacccctctgctattctggcactgatgcgtttcccttcaaagccaagcttcttgaaatggtggcttcacatcctcaccttctcattcacaccgtcgcaatctggtttctacttctgtgtcacgtcttcctaaggtcaccaatgccctcctaaaggtcaacaggatgatcaggtcggaatcctcatctctttgacctccctgtagcttctgatgttggaatctggggaaatgctctcttctgtaggccttctgccttccctccaacccctaagggcctcacaacgctctgggttccactccagtccccagttccttctctcctggttctgtgcatctgctctgagaatttcactctcaactatggaccctgtccagcccagctagagattggtgcagtgagctcccccaacagtctccctcccgcaggccaacacagctgactgcctccactcctcatcttggtcaatggagagcgtggcgcctcttctgcctccatacctttcctgagccatttcaagacccagacacgtactgccctgttctgattatcttcccccgagtgcttgacacgtattcagtgaagcaatagcaccagacagttcttacagacacaatgactttaaacttgggagtaaggatgcctggcagaggctaaggccgctcctacacaccagtggctctggtgtgcacacaccagtggctctggtgtgcacacaccagtctgggtcagtggctgcaaccacctaatgcacttgccagggggtgtacaggacttggcaaacagcaaaggacaatttaaagacaattagtctttggtgctttaaagaaaaaaaaactgaagcatttattccatctgctccctgaggttcagctggagatacaggtttgcttgcagaacagtttgctagggacatgggcatatggaaaactctccagggaaagagaagaggggcgggctcacaaaagcacaagagcaagtgtgctgtagccagagggagggagggcaacaccacctgtgcagctgcagccacagccacctttctccaactggggacgcctccatgtacttgcactccctgcgaggtaatcccactatctttccccaccgtgtgctccgggtgacagtgacgatgatgctaggtgaccactactgcagcaagccaattcccctctagcatagtttgatcaactacgtctacttatccttgatcaactatgtccacacctgagaaatgaaggggctaggatggccaagtgctctgacttcaactcaccatggaactggaagtagatctgtgggccttcctttctcccactgcttcaacctctacacaattttccccaggattccaatatctaagaaaccagttattgttaagccaattagctcattctttctccctgatttcaactgatcagaactgctgaaaccactcactcaagggccctgcagctctcaccatgattccaaatgcatctcctaccctccccccaggaactgccctgaccaggagacatgcaggagacgacctccaggacggccaccctgggccctgcccacactactcacagggaggttcagcttgacggcatccacaggctgctggaaaggccatgcaaactggtgtttccatagtgtcttgagcaccactctgagcaggtattgcagttggttggtctgcctcttgggcttgttagggttggaggtctctgggggcggggggttggtgctggctgcgttggctggctggggttgggcctgggcctgtgttgtagacatttgggaagtttctagtccatcccccattactggcagatttctcaatctcgtcccagggccgctctccgcagacatgctagtgatcccatcacattcttcaccaggcactctacaaaggaagagaagagcccccgtgagatatcagtcagcagatgggcaccgctcagaatgacaagtccctctggctgtggtctccaaggactgagttccctggcggtagctagccaagttggccagagggaccaccccatgctttgactgaaagggttccaatgtctcctctccccaaagacttaccctccagcagggaggagaccacaaaccaacagaggaggcagagtgaggtggtgagagcccactaggagccagcaaaggctctgggaactatgaaggtcatggggaaggatgtacaatgaagccacgtctcacaaacctgcacatcccttttcccacctgtgagtttttaggagatgctgcctgtgtgtggaaggggatgatgtgcaggctcccacatatgacatttacattaaaactccttgcatttatcacacacaaagcatcgagcaaagtcaatcatttcatttggtgggccaggcaaggagaagcaggaaggctgggtctgcccacccatggatggcccacccagtccactgccaagtgctcagggcaaagccacaaacctactaagaatattttcttggtaacttaaataatgcaggtctgctgaggaaagaatctgcatgtttactgccgataaaataaaaatgaatccatactagacctaccattttcttttttttttttttttttcatctctagtaataaacctaagaactcagtggagatatcattctgggatgaacttttagtgggttcagaagcagctttatgcctagcacacactaggcaccctagctgccagtgaattactttgtgtaatttatttaaaccaggattacacaaactttttttgtaaatgcagttctggcaaataatcctattttaaaagctccaaacggagaatttgctacataaagcaactccatggactaggctgtggagataggaggccagtgagataggagaagacacagggacaaatgacacaagccacatatcagcttgctgggaaccttgggtccagtgtaccagtcttggtccagacacagatagattacaggacacaccaagtgactggacacaagtattggtagaaggacagcatcacagacaaggaaacaagtcagtggggtttaaaccccactcacatgtggagtaggctggagagggcttccatgcagcaggaccagcaagtccaaagtgaccaatggggacaagtgtgatggggtcaaggggaggggaggcctaaaggcactgtggaagcctggatcccaagatggagggtacaaagagtgaggccaaggaatgccattcagtttggtttctatgattagatttctcctagaaagcagctccagaaacatatagctgatgctgcgcaccaagcacacgccaggtaagtgatggcaggcaggggcaggagcagcccagccacaaggacacaggcggccagggtgcagagccaagctgtcccaaaaggaagcagaccctataaattttccattaagtaatgacattctggaaatctctaagcaatgcccttgaggcaagatgaggccaaggacttctagaacttctgggctgggccatgcttgtctctttccaaaaagacttgcagcaaagccaagggacaaaaactcatgtgtgctctaggccagtgaccactcttcttcaccttctcaccaggcctagataggcccttgagccgaggaagctgaattttcctttttttttttttttggagacagggtctgtcgcccaggcagtgcagtggtgcaatcttggctcactgcaacctctgccttccagggtcaagtgattctcccacctcagcctccccagtagctaggattacaggcgtgtgccaccatggctggctaatatttgtatttttagtggagatggggtttcaccatgttggccaggctggtctcaaactcctgacctcaggtgatccacctgcctcggcctcccaaattgctggggttacaggcgtgagccaccatgcccggacagaagctgaattttctgttcacaagaggaaaaaaacagttttctacagaaaacctgactcttgaaccttgcctcatttggtgttttaagccattgcaaaagccaaaacacccctccctagccagccagctcacaagtgatgcacagtaacagttaaatcctcaaaaatgctaacattgcttctggcctcatccccactttacagatagggaaaccaaggcagagagaagtacctgacccaggagtggaaacaccaggtctaagcagatagagtggcccaaaacctggcatctgattcctgggcagttaagttggcctttgaattaaggaagtcctcattagtgagctgcacacacacacatcagaagtgtccaacacagatggtcgtgacacagtggccatccttaacacacacacacccaggcccctgaggaaagaaactgctggaggttgtctgttcaaatgtgaaggtatgacatgttcgacacataagacaaacctggtagctaccagtaccccaaagtttctttaaggaggctctgaagataaccaatgaaagtgacatctggccgggcacggtggctcacgtctgtaatcccagcacttcgggaggccaagaagggtgggtcacttgaggtcaggaattggagatgagcctggacaacatgatggaaccccatctctactaaaaagacaaaaaattagccgggcatggtggccagctactcgggaggccgaggccggagaactgccttgaacctgggaggcggaaactgcagtgagccatgattgtgccactgtactccagcctgggcaacaagagtaaaactccatctcaaaaaaagaaaaagaaaagaaaagaaagtgatatccatggccccacaagggagatcaccataagatacctgggactcctgcacccactctgggcctgtgcagcacctgcacctcaagggaccacactgacctactgctatgcccacagccttcccatgactacaggaaagtaagacccttgggaaacttcaagagcccactcttactgcaatgacaagaaacatgaggaaaaccaaccacttctagtctgttatggggcaagaaagagaggtacagtgagaagtcctatgtgagacccagatgacttttctaaggcccagatttgatatgaggtcagcctccttgggcgaattcttcccacagcggttccccccaaccccacactgccccaggcccctagcatctaggctctaacaacaagtcagccaaccctgtcaccttcagcctttgatctgctagccctactgccagacagatggatggatgcagacataggctcacagactctctctctctctctctctggcccatagcatctggtgcttccctcatctccatctactgagttccatggtcagccccctaggaacctgaaggcaggctcatctttatttcacttttatcttcccagcacacaggaggtgaacccttagtgaccatacccacattgtcatcctggggcttccagctcaatctcaaagctctggaaaagcaaaacagttcacactctcacatggataatgtggagaccaccagactcagtcactcgctcaggcaacaggtcctaacatgccttgccctaggactcagcggttgacatggcattctcccgagtgattaggcaatacatggggtgaatactgtggaggagaagggcagggctgctctggccatggacggggagagggatctgcactgacccgagggacaggcggcatctctgaagaagggacagagaatgagaccagaggcgggggaagagtgtgtgcgcttctgtggtgggggtcaggcaggcagtggcaagagaaggcatgcctggcatagataacaggagacaacatcttcaaagttttccgttgaaaagattaaaaactgctgctccctctccattttcatactgacctgtggccaaaaagcaggagccaccattcaccacgttaagagttagctgaaggtcaaggaaaaggaaaagaatttcgcttattgtttccaatccaaaggcggctacataatcgaacttgatgtcctacttttgtatctacttccaacagaaaccctatatcatgttcccagtgtagaagaaaaggatgaagcaaggttagacaatgctgtagttcccaaactgagtgcccaggtgccttggggatgtcatggtaaactcagatggcattgcaggaactatcagcacaaggcaattgatcatttcaacaccagattgcactatattcaacagtgtcacagcctgcaacacttgatcagcaagttgctgtaataaaacaaagattgtccaggcacagtggctcacgcctgtaatcccagcactttgggaggccatggcaggtggatcaccttaagtctggaatttgagaccagcctggccaacacagtgcaaccctatctctaccaaaaaaaaaaaaaaaaaaaaagtacccaggcatggtggtgtacacctgtggtcccagctactcaggaggctgaggcaggagaattacttaaacccaggaggtggaggttgcagtgagcagagatggcgccactatactccagcctgggcaacacagcaagactccgtctccaaaacaaaacaaaacaaaacaaaaagcaaaggtcatataaaaatcaacatgaacacctgtaatcccagcactttgggaggccgaggcaggcggatcacgaggtcaggagaccgagaccatcctggctaacacagtgaaaccccatctctactaaaaatacaaaaaattagccaggcatggcagcgggcgcctgtagtcccagctacttgggaggctgaggcaggagcatggtgtgaacctgggaggtggagcctgcagtgagccaagatagcacaactgcattccagcctgggagacagagcaagactccgtctcaaaaaaaaaaaaaaaaaaaaaaaaaaaaaaaaaaatcaaaatcaacatcaacaggagatgcaggtagtgacatccaacctggttctaaggtttgaggatttgtgcagcatccaacaggcagacacatcctattagaaagtaactatgggccaggcatggcgggccacacctgtaatcccagcactctgggaaaacgaggtaggcagatcacttgaggtcaggagttgcagaccagcctgccaatctggtgaaaccccatctctactaaaaatacagaaaaatcagccaggtatggtggcgcatgcttgtaatccagctactccagaggctgagacaggagaatcacttgaacccgggaggtggaggttgcagtgagcagagattgtgccactgtactccagcctgggcaacaaagcaagactctgcccaacccccgccaaaaaaaaaaaaaaaaaaaaagaaataactatggttatgtaagaataaaatatatattcctgtttttttttttcagacagctacacagttgttgagacattggtacttattctgctgcttgtgcttaaccacctaataaacaatattgttggctacttcctctggcctgaggcatcacagaaaaaactgagacgtttaaggatgttgtgaaccaagaaaatttgggaacttctgggttaatgaaaataaaaatgtaaattttccctctaaattcatagacctctgattaagcatgcctgttttcttttcttttttgagacggagttttgctcttgttgcccaggctggagtgcaatagcgtgatctcgactcactgtaacctccgcctcccaggttccagcaattctccggcctcagcctcctgagtagctggtattacaagcatgcgcctgcacgcctggctaattttgtatttttagtagagatggggtttctccatgttggtcaggctggtctcaaactcccaacatcagatgatccgcccacttcggccgcccaaagtgctgggattacaggcgtgagccaccgcacccggctaagcatgcctgttttcaaagatgttctttgcaatcataatatttaagtgaattttgggaaaatattagggatagacagtacttaacagagaacacaactgtaatgttttataactctgaacaggaaacaaactgtttccttggactaactttatttacaatctagtcaatagttcagacaaattagaaatctaacaaaagatatagaaaacaaaaaatccaaaaccagctcagaaagtttgaacactttctgcaatgatggagtccctacttgcaaagtggatggcagcaagccctcttcactggtatcctccatcaagtcatagttctctccatcgcccgtcccaattagctcctatccttcaaaggggctttcagggtctccagacaggctttgttctgaacccactcatcacaaagcagtctggccccaagcaacctgttcccagaccaggaaaggagattagaaagcaggatatagatagatacagacatgcagggcaggcttagttctgggactctaaaggcaagccagagaggaaaagagaaagaccacaaacaactgcccagaatctgctgattgctggagattcagttcccagttccgtccatcacaagtcactgagaaaaccaatgggttgggaccagctatactttgtatttgcagttctacctgaagtcctggcctcccagcggacctcttgaaacccagtaatcctgccttcattctgtctggtctgttcagactcacccctctcctaaagtgatggagcacacaggtagaaagacgccagggaaggcagaagcagtcgccaagacgatggctggttaaaccacacttagcagagctttatgcaagccatcatcacacagacctgcaccagggcctagaagagctccacaggaggtacctgccacttcttgagctgatgctgttatcgagcacttcatctgtattggcttagttatccacacaacaaccctaaaaagcaggctgcgactttatcatcttcatcatcatccccatggggacagaggcagagtggatggtggcctggttggctggacgtcatttggaacagtgtgtgcttcaagtcctctgctccacagctgtctccactcaccaagcacagtggcaacacccacaaggggcagaggcccagtcatcctacacgggtctttggcttggccagcagcaccacactttgctgtacccatcagtggcctgccttctctgcagaagcagctgggtgccatgtggcccataagctgggtcttaagtcagacttctagcagtagtattccaaagaatttcatcctcgtaaacaaatcagagccaagacctctccctgcagcacctggccatctgcttacaatgagatatatcccgtgtcataggtgaaatctaaaacataccactgtgctgaagtcatgaggtgtgggggcaaggggaagggacaccaagttgttatttatgcttcccaagcagtaagatgcctgaggggacatggcttaaatttgttttattccatacagactgccagccaatgccaactgactacagcccctcatgaaatcacaagttcacagtcacacatacccttcaggtagaggaggtcacctctccaccgctccaaggctcttgaataaacaattattttcagggaatgctagattctgcccagggacaaaaacaagaggatgagggaccctgactggtaaaaacctggtaatttctcaatacaattcaatttacagcaatttacatcttatcttgtcctagaaacatctttgctgaaatgctgattacacaacatcaatatcagaaggtctgttcccctcctaggtgctagagtggcatctacttcaaattcctgacagcggcttctttaattgtgcaatctgtgtcagtggggaagcacaaataggattacttttccatctgactggctcaggcagctggtgagaacagcgctcgtgtcatcagccagactgcgccgcctggagccgggccagtggccgtgcgccgaggcagctcttagaggccttaatcctccttcacgcagtgtgtatacaccctgccccccaccccttggaccagccaagtggtggggccccattacctcttgactctgcagtaccccagaccctgcaacttgccttggattagacaagccaaggcagagatatactggccttgctgctaggggagagtgtgagccacactcaagctctctgttccccactggaggggacacaggcacacaaggatcttgcagtcaggaggccaggaaactgggcgggacacaatctcaccaaccagaattccagtctctctgcttttgaaactcatcagcaggctaattaaactagtagcactgaaaatgctgcagcatcttttcactgcaaaagctgccagcaactggagggacaagtggctcaggtacagtgaaaggatccattgttacatgtgggttacatcatgttgctgattgttaaatctgggcggatggattcatgaaatgtaaaatgttcctgtgagaagcatgtagcaaaaacaaaactttgacatggacaagatcaaaactgttgggttggccaggcatggtggcttacgtctataatctcaacactttgggaggccgaggcgggtggattgcctgagttcaggagttcaagaccaccatgggcaacacagtgaaaccctatctctactaatatacaaaaaattagccaggcatggcggcgtgcacctgtagtcccagctactcaggaggctgaggcaggataattgcttgaacttgggaggcagaggttgcagtgagccgagattgtgccactgcactccagcctgggcaacagagcgagactccatctccaaaacaaacaaacaaacaaacaaacaaaaactgttgggttaaaatgtattccagcaggggcaggctaggctaacttttcctgtaaagggccagagagcaaatattgtcagctgtgcaggacaaacagcctgttaaaatattccattctgccatcatcataaaatgaaagcagccacaaataatcctgaaacaaatgagcctcactgtgtgccaaaaaaactgactggcctgcaggccatagtttgcagcccattccatagatttctagactttgtgaaggtaagagaatgtgatgttacatcagaaatgcaggatgcaaaattacagatgaaattaggtaacaatgccaggtgggtgggcacaaagacccacagaatgaagccagaggtggtggcaggtgtgtggatgacaacacctacttacactgaaaaccaaccaaccactcggccacacatgtaaaaactactcagcctctatgcaatctatcccctttgacaagcccatactggcctcttggtgtctgtccacttctacctggtaagttggcccttcaggcactacacctggccaaattacaggctgaaagattatgatagaaatgtcattaattcaagctatgcattcccactgactcagctgtgcccttcacagttaagagtggcattttctccttgttgactcctttaaagccatttccccatctcctttacctgtcttcactttacaccttttcagctattcatctttttcaacagagctgtggggtatgtggcactgagattcatccacaccataatatgaaacacagctggaagtgctgacacacacagtcccagctcttaggaggctcaggtgggagcattgcttgagctcagcaaggctacagcagttaagctatgatcatgtcactgcactccagcctaggcgacagagtaagactctgtctttaaaaataataataaattaaataattaaattatgaaacgcaatgtgacatgactgtgaatttatggattaaaaccctgctttgagagagactccaagatggccagggagcaatgcagatcacaaagtaggggctggcagtgagctgggcactttgctctgcttaagaggggtgtttcctaggaggaaggaaatacgggggacacacttggagaatgaaagactacaaagacagcaagagtgggagaggaagttcacttcttagagggcacgaagaattaaaatgagaagaaagtttaagagtgaaagacaggtttagttaaactcagctgataatacactcctgggctgcccctggtgtcaatcagaaaatttctccggatgacatcacaccggtcttctgaaattttcccattgcaaacaaaagcataaaaactaagcttataatcctcatttaaatttaaaactataaaaatttcctatataccaaacaccagggaaacatgttatgacagcttctatgtgagtggtcaagatcacgccctttgggaatttgggaagccaagagagagatgagtgaaatgcaaacaacaatctgcatggttcatgaccacaatgcctgtggctgaaatgttccaaaacacaccagcttaacacacagtcctgttatgtgtaagtggaaacaacactgaactcttgaaacagatccacgagtgggaatggtgacattccaatcaactgctctaatttcacccactgggaagccgcccgggtgagtaagcaagagtgtatcacgcctcttaagtttcttctcaaagcagcagagcagcggctgactcaaggtgtccctggaacctgcccacactcactggggacacaaaagggaacagggctggcacaagtgctttcagagacaccatgacccaacacccccaccagcaacattttagccatgactagcaagagcccttgctgggtgggaaagccaaactagacctttgatgggcacgaggagagatggagccaggaacagacacatgcatgaaaggcaatagcacacaatgactcagggtccagaggtatcaaagcctgggtatctcgatgaagagctgacgttaatgggatgatcttttcttcaatgatattaccctgggcacttcattgtgattttaagagaaagatctggaaaaaacgttacacctgtcagtatctagacacgctcaagaaatggcttcagacaagaagacttttcttctcatcttgccctcaccactcattaggtacagaatccaatctatggggatcaggaggaggaacggcatcacttttcttgaagaaaagggaacgcagaatgtgacactaaattaacgtcagagcttccagcttccaaagaccccaagtccctggctgacaaagcaggaactgaagactgacccaagacccaaagatgaccagtcagtgagagctgacagtgtctcaagtgctggatttatatctgatacacacccccaagggtacacaaaaggccattcttacaactttacagaagcctttgatggtcaatgccgtcctaggtaaacaggccaaggggtccccaccttccaggcaacattaacttcactttcaagcttctcttccctcaggtaaaagcaagccacccagataacccattccatgcactgctgggaggccctccacacacattcagtgtctacttctgtccagacaactgaactgaatctgctggagagggatgcttggaagtaaatagctgtcaccctctcatctcagtaactttcagaatataaaggagcagaataaaatgaaacccacaccacttcagacgactacagctaaggaagcaaaaaacttggcaggcataatcactttgtgagaaccatgttcttgtttgcccctaattccacctaacttccacaaagtaaataacccacagaagtcaagcagcccaactcttacactgacaggcgagtacatggaggtgctggagagaaaagacacagagcatgcctcatctcctcactgtgcacacccttcctcctctctccagcccctgcaggcagcagccactcacagagcagccctgggtgctgtgccacaagggagccttggatgcagccaagttggcatcttgcagactcaagagtccatcacacaacctaagttcactcccctgcagatgtggccagcttgtcctctgagtccactgaggagtaacagccacttaactggtaaggaattttcagaccaatagaaaccaaaacccagggcagcgactatcacactcgtatggaacctgtggcagtccctaggaacgcctcaccacctttctactaaaaatctgattaagttcaggagttcaggcccagcctgggcaacatggcaaaaccgtgtctctaccaaaaatacaaaagattagccaggcttggtggtgcacgcctgtggtcccagctactctgcccagctccagctacttgggaggccaaggagggaggatcgcttgagcctgggagacagaggttgctgtgagccgaaatcacaccactgcactccaacttgggtgacagagtgagaccccatctcaaaaaaagaaaaaaaaatctaaggatgtagaaataaggtgcatcacacataaataaagccttagactagggtctagcatacagaatgaaaaaattttaaaaagtgcacatccctgagtagaaaagagatggcaagataacataaaactttggctaatttttattactactttttacatttgtttttcccaactccctgaaataccatcaacatagttatcaatcaggaactaaagggaaaaaatactttaaggaggacttaaatggccaggggtgggtgggggcacgaagcacagcaggagagacacctggcttagttaggatggtgcccactctgagtttagtaactgctttaggaggcgtgtgtgaggagagccagagagcaacatgctggcagcatgagacccactggccttccctagctccctaagttattcccaggttctcccagatgccatgctaggcttgcctcgtccagggagggagccacctcaaggaggtgccccattaccctctcctaagtcccaataccctcccaccaattcttcccacgcctctgtcctatggacctaaggccaaaagccagacaaagggggacaaaggtctttcctcaggtatccagtaacacaaatcagtccagtcccctccaccccgagcagatgagaaaaggagcatagcccctcccctgcaccggcctaacatggaggagccaacacagtgctgcagcaagaccataatcaggcaccgtggtactcacaggctggaggccttattagcacagaagacgagaaagagacttcagcagcagagacagggaagtaatagggacatcaggtggagggcatgggagaggaaggtggctgctgcacggaggaagtgaaactccatacttgcacatctgcgcatgtccaacagaaatacaatgtggctactcatgccattttaaaatttctaggagccacattaacagagaaagcaggtatgcttacccaaaataccatttcgacatataaacgtgtaacatttttttccttactaaatctgtgaaatctaagtgtgcatgccccacagtcacagcacaattcaggtgctaaattttcacccaaaatatgtgatctgtatttagattccataaaacttgcagctgaaaaagtagattcacatacccgaggtgtccccaacatatctggatgtttttcactaactaaactgagcatcagctttgaaaattaattagaatttgattaaagtaaaaattcatttcctcggtagcactagccacattttttgatgctcaagagccacgtggggttagtgctgacctcactgtgaaaatctaagaggtttcactggctaggaggccaagggcaggcattttaggaactctgctctggggccacagggatggggaatactacacattcaggctggttagaccccagtcagtttccacacctaccacttttatcacccacagatccacctgtgctttaaatcaacctgctcaactaaaatatatctatttaaaagaaaacattaacatagcattagtattaacacatcacctgtgtgaatgggggaaacatatgggaaatctcaacacaggatacaatcattgttgagtttcctgtatgcaaaaaaatgtttatgcggttttagaggacagtgcctttattctttttttttttaagacacagtaaaaactttaataatcttatttttattatggtaaaatatatgtaacataaaacttaccactttaaccattttttactgtatagtttggtgacattaagtgcattcacgctactatgcaatcactatctagctccagaactttttaatttatgtatttattttctttaaagatggggtcttgctatgttgctcaggctggtctcaaactcctgggctcaagcaatattcctgcctcagtctcccaaagtgctgggactacagatgagccaccacaactgggcgtttcagaacgctttcaccttgtaaaacaaactctgtaacccatatatccactaaacactaactcccaatccctgcctctggcaaccaccattctactttctgtctctgtggaagtgactcctataggtacccagcgtgagtgaaaccacaaagtatttgtctttttgtggttgtcgtatttcacttggcataacgtcttctaggttcatccacattgtagcacctctgaatttcttttttttttttgagacagtctccctttgtcgcccaagctggagtgcagtggtacgatctaggctcattgcaacctccacctcctgggttcggcgattcttgtgcctcagcctcccgagtagctgggactacagacacgtgccaccacgtctggctaatttctgtatttttagtagggactgggtttcaccaacttggtcaggctgatctcaaactcctgacttagatgatctgcccacctcggcctcccaaagtgctgggattacaggtgtgagccactgtacctggcctgaatttcattccttcttaaggctgattaatacttcatattttgcctatctatccatccatcaatggacacaggttgcttctataataccttttggctactgtgtatagggctgctatgaacatgggcgtacaaatacatgtttcagtccctgctttcaaagagaatgcccttaagaaatgtttgctgaagtacacagaggtaatatcacatctgcaacttattaaaaggatttatgggtggctgggaaggatcgcttgaagccaggagtttcaggctgcagtgagctatgatctgccctccagactggtgacagagcaagaccacatctcaaaaaataataaataaaaataaatagaagaagaggagtgaaacacaggatccagttataaacttggacaatcacccatcaaaaatcagctccttcccagaagatgtttataaggcacaggcagaattcatccggaactgcagacactgccctaagcccatccacaccctccgctggcttctcctgctggtgtgcagagcacagaacagcttcacagtcttcccttgtttttaccaaagcagccgagcagctggtgctacacaggctggtgcactgcccagcagacacacagggccgccgaagggaggaagtcaacgcccgagggtggccactaagccgtggcgggtgcctgcccctgcagatggaggagggctgagttctaagcacactactctgtgaatggcatgaatgagctctttcactggcaccagagagaacacgcaacagtaccatctgctgaggggagggaaagttcagaggagcaggcaccgactcctcaggcttccacagccaccaggtccccactgtgtcaaggcggctgttaatactcaagtcccctcctccactcctgaacatgagagttaaacaaagtcagctacagtctcttggtccataacaacctagggaaagcaaactacagaaccacgttagaaatgcttcacgtcttttacctcaaaatacctttgtttagtaaccccactccccgacacaggccccatagctctgttttctgggttctgacaactagtgccctaagccagaggccaggccctaaagagacaacctaggcaggcttgagatgtttctcccacgacctttccaaatgattccagcagaaagccagactccttagctacttaaaatcagaaaacagctgggtgcggtggctcacgcctataatcccagcactttgggaggccgaggcgggtggatcacctgaggtcaggagttcgggaccaacctgaccaacatggagaaaccccgtctctactaaaaatataaaattggccgggcatggtggcacatgtctgtaatcccagctactcaggaggctgaggcatgagaatcacttgaaccctggaggcggaggttgcgatgagccgagatcgcgccactgcactccagcctgggcaacaagagcgaaactccatcttaaaataaataaataaataaataaaataaatcagaaaatagatgggtattacttcccactcaaaaccactctcaaggtagctaggttagtgcaaaagtaattgcggttttgatccaaaaaaaaaaagaaaaaaaaaagccaaaacagcagttacttttgcaccatcctaatagatctgatgaaaccaggagaatggaagctaggaaagatgtggctcacaagcaatgggagaagtgtgcttgtaaggacactggagccccccagcctctgggttctgcccacggggcaccacccacagccaggtccctgcctgcatagacaggaaggaaaacggggccacttcacagggtgctacagggctctcagcaaggggctcaagtgagggaaggctttccaacgaagcagcctgaagggcaaggagtaattcacatttttgttttagttcttggagaggtttggtttcaaggcaggatagacacattaaaaaccatatgactgccttaggcttaagggtagggcagggggtcacacgctaggcatatgaagccctaatgacaggtgtgtgtacttctgaaacccagaaaatgaaatccctaaggacttcactgaggatccattggagattaaaaagaagctcccatcgaggcctcctcctgctcgagtgacatttaacaccaagagtaagctgactgacatgtggattattaaaagtgtattcaaagtcaatgttaaaaagttagtactagaccatttcaattctcttcaagacgcagcactgacttagaatggaatttttgatgcgcctccactaatcctgttacgttagaaaacagaaatagaatttgttcccttggcgttcactggttgccatagaaatcaaaatgcattatactttcaggtgaagaaatgcatcacgagtactgaaaaagaaaaactctcatcaaatccagtacaaactcaaaccacccctttaataataaatgggtgcaagtatacacctagaacaccacccaaacagatgtgttccagccctggggaagcaatttcattcatttcaacatacagaacaccaacccctagaaagatgctctaggcaaacagctaatctggccaggctgggactctgcctcagatggtaaagctcacaacatatacacccgcttctcatctaagcctgcagttttcatgtttccagtgtgttccatctcatacccatatgtacgaaaacctaagtgtaccccctcttccctcataaacacaggctccctcatgagttggttttgctatctctaggggatgatatacaggctattataaatttgatttcaacccaaggaaacatttgagaggttttaaaaagcgttcttcataaatgaaaaagaaaagaaaaaactctattgcattaaagacgcatatggtattttttttactggtcccagatggaaagaagtgggtatgatggcacttcagaccctgcaaaacccccaagtcaatgggttatggtaactgtgacctgaccattgcttatcacccaccaccaccaccccgatcctgttcctaacatgtgtctactgggcctgctcctgacttgttatgccctgctcctggagtaggcctataaggagatggtgttaaggtgaagaacagactgcaaatcagctcctagttgaggctagccaaacagcaggtgcctggggatgactcagtatccccatcatttgaaattttcctggtttaggtgaaaatactgggagttctgactcatcctactacatctcttgggagactgtgggctcaggagattcaacacaaagacatctgcccttgtgggttcacaggaacagatagacaatcaagaatgaaaataacaactaaaattaggagatggtaaaccctatggaaaaaagaaatgtaggtggcagatgggatggcactttaaaaattcctactccttatgactttcacaagtgaggctctgtggttcctaatctcttctcattgcctccgtattatgcactgaacaggataacagtccacccagagaatacacattctccactggaacatctcatttatgtgcaaattgctctaaagctggttcccctgatatataactattttgaacacaggggcttgtggcttacttaaaaccacagcttccatttggtgatagcatctttatactatcatctttaaagataatgaaaaacgactgaatatgcctttgagaattaatgtacatatgtaaaagagcagctcattaagcaatcccatacgacttcagtggtttgcatgctgtactactttgcctagacattgattttaagaagcttatgtatatcttcctgagtcaaacgaaggttcagtcatccttgactctacccttcaggcaggttatgatgtcagcaatccttaggtttacattcttacagccaaaaggatggtaattccttccactataccagttattttgctacgtagtgacaaaatgattccctaaataaactgtaagcagtgctgaatgatagccactcagctaatcaaagccacatttttcattttacaaatatgttccacctttaattgggaaagcaagccaaaaggagaccccctagttatcacaacatcccaccatacttaatgatcccaccctggtgttctctgtatcctggaattctcagaagttatacaactctcataggccaaaaacaaaagagcttcatttcacagccatctggaggtgccttcatgacactcaattacggctgcagactcagatgacttatctacaccccaaagggtctgcctctgctgctggaaatgctagacccagaagcccttggcactaatttggaccacacaatggactacggggaaaactacctgcctaatagggcatcgtgagcaaatgagaaaacaactgtagatgtttcgttgaaaagcctgggccgggcgcagtggctcacgcctgtaatcccaacactctgggaggccgaggcgggcggatcacgaggtcaggagatcgagaccatcttggctaacatggtgaaaccccgtctgtactaaaaatacaaaaaattagctgggcgtggtggcgggcacctgtagtcccagctactgaggaggctgaggcaggagaatggtataaacctgggaggcggagcttgcagtgagctgagatggtgccactgcactccagcctaggtgacagatcaagactccgtctcaaaaaaaaaaaaaaaaaaaaaaaaaaaaaaaaaaaaaagaaagaaagaaagaaaagaaaagcctgaaacatccccaaaccaaaagtctagttttaggtctcacaatttcggatgtgaaaggattgcagcaacagaaggagggtaactctgctcacactgctggtagttaatgtcctactctcttaactcctcttggagttaagtgcccctgaaagggtgcttcctgccagaccacaccaagtgcacacctgggtgtctccacaacagccgactactgtcgatgctaaaagttcaaggaggccaatggcagcaccactcaaaacagtgacatccaggctgaaagaaaaaaataaataaataagctcatctttaactcagaaaaagattagctgaacctcaggtgccaatataaaaaccgaagctaaaaaacaagcctgaaaccatacagtttcgcttgttaaagacactagagtggttgttttaagggctcctggctacctgagcccaaaccagaagtcctaggagggtggcactgggtagacccagcagggtggcaccgggtaaggccactggcaggcttatctcagttcccaggacaccagatcataagcagaccattaaaaggagagtagcagttaaaggtacaagacaggaagcaacagctggcaactcgatagcaggaaagcagacagctatgtcctcttgccaaaagaaaaatcagccaaaaatttaaccgccatggcagagtgtaagagctttagccgactcgtgcaggcaccactcgttagtctctagtggatatgactgatagtaaggtgtccccaagctagcgacccggaaggggtaaagcacacctatattttaaatgtttattgtaaaatacacagaacctaaaatccgccattttaaccatttttaggtgtacaattcagtggctttaagtacatttacactgttgtgctaccatcatcattatcctcctctggaacttttgcatcattccaaaaagaaactctacccactcaacagtaactccttaatcctcctgctcgtggtaaccactattttttgtgtatgtatttgaccatttttggtatctcatgtaagttgaatcacaatatttgcccttttgtgtctgacttctttctcttagcataatgtcttaagattcatccaagttgtagcatgtgatattgtgaaatacatatttggtcttcaccgtttcctggcatacgattccctggaatccccaaaacgctaagtgtctttttgtaggctaatgagtagactgagggctgggggctcctggatagcacaatcaggaacaattaagaaatggagcaccatgctaggacataccatgagtctgagttttcgcaaatgtaatgattttctcatactctgaaactaaacatttctgtgttgagcaaaacataaacgccaaggcgaaatgttcttgttcccttgcatttctgcagctgtaactgataaaggtctggacgtgcagttcacagcagaggagagagactgtggctgctctggacacatctggacgacaggcacccagccctcaagatgctgtctgccagctaggtggaaacacctcatgtgaatgggcccatttgcttcctctccactccaaaaggggatgagaagaggaatgttggtatgtgatttttgcagcaagcactgaactcaagcgaagcttggttatcttgccacctggaaggttaggtgtgggaggatgacactaaaagaactggcccagaaatccagggctaattttgttcccctttcccactgtttttgcagaaatctcaatataccacaggcagccaacagctcaggagaggatcgtgctccaaatgttcatcgagccaatcattgggacttctctgccaggttcccagggaagaatgttgtaaatgatggctgggtgccatggctaatccaaaatgaacagaatcgctatctcctcagagcctgggtccctagggcctggccaacatccaaggtgcctgggacacagacagccagtgaggggcatctggagccctgtgcagtgaagtagcaggcagtcaaggatattgaaaggtgtgcaggctgtcccagaccccacgcccagaaggccattcagagaccaaagaacatgactaactccaaaatgaagataaaaactacagttcagctatgaatgttttccgtctaaacactcaacaccatactactactttgtgctgtttacaatttcctagcctgctattaaataaaaggttccataaaagggggcaacagcccagaaaacaaaccatattgttgaagttgaacctctgcccatcccagaaaaccagcttgctggagaaacctgtgccatgtcccactgcagcctgggggtgccacggtgtgtgtctggtgtctatgcatactgtatccctagcacctcatggcactgggcatctaacaagagcccagggactagagacaggttcccgcatctctctcacggatgcacttgctgttgctagctcatgtggcctcctgaccctcgatttcttctatcaatacactaggctttctctgccgggaataccttgttctccaagacactccatctggctaaaatctttccttcaaaaggctttccgtgtgtcctccatttttgctaatttcaagcctgccttgggtggctttcccaactgttgctgtggccagaatttgccttatcacaatcacagggtatctacttaatgctgagaaactagatgctttccccctgcatctggaacaagacaagcatattcttactactctttttcaatcatacttcaagtccgaactaatgtaataagacaagaaaaggaaatgagagaggcacagattgggaaggaagaaataaaactgcctttgtgggggctgcgtgcggtggctcacgcctgtaatcgcagcactttgggaggccgaggcaggtggatcacctgaggtcaggagttcaagaccagcctggccaacatagtgaaactctgtctctactaaaaatacaaaaattagccaggcatagtggcacacgcctgtaatcccagctattcggaagactgaggcaggagaactgcttgaacccggcaagtggaggttgcagtgagctgagattgtgccactgcactccagcctgggcaacaaaggcgaaactcagtctccaaaaaaaactgtctttgttcacagatatgattgtttaggtaaagaattccggccaggcacatcacaaggccaggagatcaagaccatcctggccaacatggtgatatcccgtctctactaaaaatacaaaaattagctgggggtggtggcgcacgcctgtagtcccagctactcaggaggctgaggcaggagaatcgcttgaacccgggagagagaggttgcagtgagccaagatcgtgccactgcactccagcccggcgacagagcgagactccatctcaaaataaaaaaaaaaagaatcccgaagactcctggataagaagcaaggctgcgagatacacaaacatcaactgcttctttatataccagtaatgcacaattacaagcaaccacagcatctaccacactgtaatgctgtggccgcatttgttccccttcttccaagtgcatattggcatggatagtatctagtgagtgcttcgcaggttgacaggcctcaatgtgtgtttgaagaaagccagagattagccacgatggtcagccacacaaggcccaaagcctgaggcagaggctagcacatgatgtccgcagaccagccagtgtgtctttagagagcagtggcgcggagagtaaactatggccgctgaagtggacagggagccaaaaggatctggatgtgaggcagcatcccaaagtgcagtctcctgaccgtccagccacactgagattctgaagcaccactccgtccagcggcagagctttaagttggaaaatccaggggcataaagggagacaaatcaacttactctaaatcctctgaaaattcccttaacaaaggagttgtgttgacagagacttctctaatctgaagagcaactgtttctccctggttctctaggcatataaccctttctgcccacctctcatggagagtaggctctgacggcagaagccccccccaccaacagccaccacatgaaacaaacagatacttcaaagccagaagatctttgttcagatcctgcccctgggcaggcacctcagccccaggtccatcttctaggtggatttcgtaacatctaccttgtatctgtgaggagtaaacaaaagatacataaaagcagccagcatagcttctaacagatagacgtttaaaagttccttcccctttgacacacaaagtcacaggatgtgatacagcagtagccctcagttacattagccctcagctacattcttaacaaaagacacaacatagcatggcagccaggcctggcatggtctccagttgtgccctcccgttgaccaggctgcacagactgcagagccttccaagctgctccttctgcagtcctaaatctacttgagagccgctgctaagaaaacatcagatggactatactgctgctccctaccttcctgaataaacaacgtacacacgatacagagaagcactgagccactgccaccgaacccccccaaaccctggcttcacagagttttaaaatcgccttggggtactgcggttgcttttcaagtcttttacccatcaaagcctgacgcacttccacacattcctttgtagtgtttactggacaagtgcaaagaactaagatacgctctgtatttacagagctaatgggcctctttcacagcaagttgacatctcatctgcttttggacatgcctttgctcagggatcaggtttagtgggagatgccccacctgctggcaaatggaatacagctgtggactctaaccaggcgtcctcacttcctctgtatgaagccagccttcgtcacagcagatgatgtaagaggcagaaaccagctggaaaattgcaggtgaaatggtaatggcagcatataaggaccatgcccaggaaacccaagggaccaggtgcagcacggtgaaagagtgctgcctacatgtgtgcccatccacaacctcaagcatttctgcaatcctgcctgcaagatgaaagaaaaggaagcattacaggagattctattacaaccagtggaatctgcagttgggagagccactatgaggcacaagatgatggcctgcctcacaagggttacagcagcacccaacaatcctgagaaaagatccctctgtgcctgcctctgcaggcccaatgactcatagccaaatttggactttattataagcaacagtttattaaggtgggctctgcaaaaggcacaaacacgggtggaggtccacaaacaaaaacacttagcgtaagcactgatggaatatttggcctgtttttgccttgaatcttagctaagtatgtacaggactgtagttaactcaacggctttcaagaaaaatgcaaaatgctttctttgcattcttaatataaaagcttgtggttggccgggcacggtggctcacgcctgtaatcccagcactttgggaggctgaggcgggcagatcacgagctcaggagatcaagaccagcctgcccagtatctattaaaaatacaaaaattagcccggcacggtggcaggcgcctgtagtcccagctattcaggaggctgaagcagaagaatcacttgaacccggggggcagcggttgcagtgagcagagattgcatcactgcactccagcctgggcaacagggcgagactccaactcaaaaaaaaaaaaaaaaaaaaaaaaaaaaaaaaaaaaaaaagcttgtggtcacatcccttctctcctcaccccaccctgaaaaagagatgaaagaaattctatacagcttccctaacactttgaactaagccaaaattataacaatctacttcccacaaccagaaaatcagcttaacagaaagaatgcccaatcattcaaatatcaatccgactccgcctaagacccaaagaaagaaaacaggtctcacactaagacatccccaagcagcccaggataatttcctaggattctggcatttgggtaactgctggcacatcgtgtcacctttacaggtcacaccccaggtgtagcaacaaccctcttctgccggcacagagcccttccccagtcatggtggcaccacaaacacttgcagtaagtgggcacatggggagcaaacatgctcagctatcatggctgcccaccggggtggctaggtatcccccattttgtagaaataggcagtgtcttccatctgggaaagaagaggggctcttgtcagtcctgtctattcctgatccacgtgtctgtcttaagggagaaggccccatcactctatgagaagtgaccatcacatagagaatgaacagaatgacccctgccattttaaaaagaattccccaagactaatggttgctggagagttctgtaactttcacagaaactcacacaattcctttctcatgatatatgtgctcatatacccatcaaagtcttttacccatcaaagcctgacacacttccacacattccgcacacagattgctatgctatgcccacagcaaagtaatcaactcaagagtcccttggtggtggtggtgggtagggggtgaatgaagaagacaggtaaggcctgggacatccccgccatggccaagcccagctaagaagctggtcgacacaattttcgattttgtgatccccagcttcaagcataactctcaatatggacacatgtagagacacacacagaacagggacacatttacagggacatgtttccatggttccttcagtggcccagcatgagtggattccttggtatgacgttctgtttccttttccctaaggcaagtctgcattaaccagctggcttcactcaggagagtggggctcaacattccagtgctatgtgtccttacggcaagtggccacccacttctgcacttcacccacccaggcctgttaaggttcacgaggaaaacacgacttaattgctgctccacagaactgctgttctacagagagcgtatgaagagctgcctctccatctacaaagagaatcccttggagtttgcacctggccaggcacagtgattcatgcctgcaatcccagcactttgggaggctgaggtgagaggatcacttgagcccaggagctggagaccaactggacaacatagtgaaactccacctctactaaaaaattttaaaattagctgagtgtggtggtgtgtgcctgtagttccagctactctggtggctgaggagggaggaccgcttgaacccgggaggcagaggctgcagtgagacgtcacagccactgcaactgctgcctgggcgacagagcaagaccctgatccgataaataaataaaaacaaataaaaacctatgtgtcggctgggtgtggtggctcacccctgtaatcccagcactttagcaggccaatcacttgaggtcaggagttcaagaccagcctggccaacatggtgaaaccctgtctccactaaaaaaaaaaatacaaaaagccaggtgtggcggtgggtgcctgtaatcccagctacttgggaggctgaggtggaagaatcactttaatctgggaagcagaggttgcagtgagcagagatcgtgccactgcactccagcctgggtgatagtgggagactccatcttaacaaaaacaaaaacaaaaaatcaaacaaaaccatgtgtggggtagggcaatcacccgtaagacaaaataaaaagataaatatataccaaaaaaaaaaagaaagaaaatgcacctgggaagatgctccccgtcactagtcatgaagaaatacaaatcacagccacactgataccactgcaagactatgtgaatccactgcttcccacccctaaaaccctgacaataccaagtgctagtgaagatgagcaacgactaaaactctcatccactgctgatgagggcgaaaaatgatgcaaccctccagaaacatctgagagtttcctgtaaagctaaacatgtatttattccaatgacccagccatctcacttgcaggtctttaaccaaaagaaagaaaaacatgttcacacaaagaactgcatgtgaatagctttagcagcttcattaagaatcaccaaaaactagaaaccatccacgtgtccttcaactgagaaatgcagaaaaagctggggtctatccatatgatgaaacactactcagcaatgaaaagaaacaactgaaacactcccactaagtagtcagatgactctaataaactatgttaacgaaaagaagcctgactcaacctctacctcccctgcattgtatgatgccattttccatttaatatgacattctagaaaaagcaaaatcatagacacagaaaacagatcaatcgttgctgaggagccggacacggtggctcacgcctgtaatcccagcactttgggaggccaaggcgggcaaatcacgacgtcaggagttcaagaccagcctgaccaacatggtgaaaccccgcctctactaaaaatacaaaaattagtcgggcatggtggtgcgcacctgtaatcccaggtactcaggaggctgaagcaggagaatcacttgaacccgagaggcagaggttgcagtgagccgagatcgcaccacactgcactccagcctgggcgacagagcaagactacgtctcaaaacaaaaaaaaaaaaggctgggtgcagtgactcacgcctgtaatcccagcactttgggaagccgaggtggacagatcacgaggtcaggagatcgagaccatcctggctaacacagtgaaacctcatctctactaaaaatacaaaaaattggccaggcatggtggtgggcgcctgtagtcccagctactcaggaggctgaggcaggagaatggtgtgaacctgggaggcagaggttgcagtaagccgaagactgtgccactgcactccagcctgggcgacagagcgagactccgtctcaaagaaaaaaaaaaaaaaaaaaaaaaaagttgctgagtctcacgcctatggtcccagcacattaggaggatgaggcaggagtatcatttgaggtcaggagtttgagaccagcctggccaacatggtaaaactccatctgcactaaaaatacaaaaatcagctggacatggtggcgcaggcctgtaattccagctacttgagaggttgagactccagaattgcttgaacccagcaggcagaggttgcagtgagccaagattacgccactgccctccagtctgggagacagagtgggacttcatctcaaaaaaaaaaaaggggaattttattgcatataaacttaagagaataaacaaaccacatgcagtacaccaccctgaccccctttagacctggtacagagaccccccaggactgggagatgctgctttgcagggaaggcagacagacctgcaagtgcagcaggcaaggacagcctggtctgaaccacgagcttccatgctaacctgggggactctgagtaacagatgttctcagccttgtgtttcctgtctgtaaaacagagcagttcggccacgcacggtggctcacgaggtcaacagatcaaggccagcctggccaacatggcaaaaccctgtctctactaaaaatgcaaaaattagccaggcatcgtggcacatgcctgtaattccagcaactcaggaggctgaggcaggagaattgcttgagcccaggaggcggaagttgcagtgagctgagatcgtgccactgcactccagcctggacaactgagcaagactccgactcaaaaaaaaaaaaaaaaaaaaaaaaaaggattaaaaaattaaaaagtgcttttctgggccgggcgcagtggttcacgcctgtaatctcagcactttgggaggccgaggcgggcgcatcacgaggttaggagatcgagaccatcctggctaaaacagtgaaaccccgtctctactaaaaaatacaaaaaaaattagccaggcgtggtggcggtcacctgtagtcccagctacttgagaggccgaggcaggagaatggcgtgaacccgggaggcggagcttgcagtgagccgagatcgcgccactgcactccagcctgggccacagagcgagactccgtcgcaaaaaaaaaaaaaaaaaaagtgcttttctgaaaggagggctctagttaaggtaaaccatggttctgtgacttgtgctttacactgagagaacaaagcagcaagaccaacaatcttaaaggagtaatacacagtccatgtagggtacactacccctgcattcacatcaactggagaagagaagctatttccagctcaaagtaggggaaagttaatacatagctattcaagagtgtttatgtacagacagttaatcttgagaaatccaaattgtgtggctagaacaaagctactgtttacaatatttttcatactaatgcttcctggaggaccttccttggccccatgtttaaattttgattaaatgtcaaactagtaaaactatttgcctatgcggggatggggcggggggagaagacggttaggcaacacagtgccaaattcaaaactccgtactagctctgacagcgaacacctttagattcagaggagaaaagtagccttaaacaggacaattcagcctatctactgagatcatcttatcaaaaggagtaactgtcattacaataaaatgcaatacaacaatacaataaaatgcaacaaagccacgaagaaggaaaaaggctgcccagcattctagcacctatttgcacaattagcccacagagttacttacaaacaatattccccttatatagtctgtgttctgtttttgatggggcactgaatacagaacctatctgccaactttaactgtaatgcgataaccagagctcacacaaccacttctcgactgtttctgtcaggatgtttccagttttttaagtatcaacattacagggttgagaaggaccaacaagcatttgatggctaatgatgacaaagtccttgatcaagatgccagcaagaacattcaccacaacagactccatgcagaatgcttggagtgatgccctctgagccccaaagcacttgctctcacatttgaccaccaaggtaggatgaaagagctcagggtacaaagaaatatccactcatccgtcacagtgaaggattaccttcattatgtcctctccagaggtaaacccaaagtccctctgatcgctaacttttttacacttaccacataatcccaacccactctattcttccgcaagtcattcagagaaggcatacggtggtgacataaatgctgacgactaccaggtcccccggatctccagccgtctgtttgtttgcccacaggaacacacagtgtgtgctggcaataactaaacaagcttttctgcccaaggaggctgagctcactcagtgcctcgaggctccccaccatagttacaagtgctggcctaaccaagctgtgcctggaatcagccttgtcactgtgccgggggagtaggaaacagttaaaacacatttttatgctttcatttctataataaatgcatcagatatcacatgaaatcagctctaggactgactgagcacctgcctgctatacattttccaggccgccagtgccctgccaggggatgtgctgagcagccaaacccagcctggccatgatgcttgtagtaagctggcagacaatgtacgagcaacaactttcccagttaagcgccaactttccctgagtgtccacatgcttagggaagaaggttggacttaaaccaacaagcaattactgaatgcttactgagacatggggctcaatgtgtctgtatgctgtattccgacctcacaagaacctcgcacagggcagggattagggtctcagttttgcagccaaggaagctgatgcgagaagaaatcggtaattcatctaaggtcacacctgactcctcaccttatacccccaaaaaatcatttcctgatggatcaagggcatgaattggaagggcaaaaccttacaacttccagaagaaaatataaaatatatttcacttcaggatagtgttcttcccaccaaccgtaaaacaaagattcataaattcacctacattaaaattaagaccatcttttttttttttttttttttgagacggagttgttgcccaggctggagtgcaatggcgcgatctcagcacaccacaacctccacctcctgggttcaagcgattctcccgcctcagcctcccgagtagctgggatttctcccacctcagcctcccaagtagccaggcaggagccaccacgcctggctaattttgtatttttagtagggacagggtttctccatgttagtcaggctggtctcaaactcctgacctcaggtgatccacctgccttggctacccaagtgctgggattacaggcatgagccacagcacccagcctgaaatgttatttcttaataataagacttgaaaggtgaaactgatccatgggctgctgtatggatgttttagcaggcacgaaaacattcacctccttgtgcatgtccatcagaggtcttgggtgacaaggtgcatcaccaatgagttgtaatattttgaaaaatattttttctaagcagtaggtctcaacagcgggcttaaaatattctgcaaatgatgctgtaaacagatgtgctgtcacccagactttgtttttccctttacagagcacaggcagagtagatttagcataatttagatttaccataattcttaaggtccttggatattcagaatggctaatgagcagtagcttcaacttaaagtcatcagctacagtagcccctaatgagaggcagcctgtcctttgaagccaagtattgatttttctacagctataaaagcctagatggcattttcttccaataaactattttgtctacactaaaatgtttactgtagccacctttatcaattatcttagctagatctggataacttgctacagtttttccatcagcacttgctgcttcaccttgcacttttatgttttggagatggcttctttccttaaacctcatgaaccaacctctgctggcttcaaacttttcttctgcagctttctcacctctttcagcctccaaagaattgaatagagttactacggccttgctagattaggctttggcttaagggaatattgcagctgacctgatctatccagaccactacaactttctccatgtcagcaataaggttgtttcactttcttatcactcaggcattcactggagtcacacttttaatttccttcgagaactcctttgcattcacaatctggctaactctctggcttaagcagcctagcttttggctttcaaaatatgttattggccttttagcgttgttaaagggtattgctctgtcatccaggctggagtgcagtggcatgatcacagctcgctgcagcctcaacctcctaggctcaagcaatcctcccatctcagcctcccaagtagctgggaccacaggcgtgtgccaccatgcctggctactttttccattttttttatgaagacgaggcctcactatgttgcccaggctggtctcaaactcttgtcctcaagcgatcctcccacctacgcctgccaaaaaatgctaggattacaggcatgaaccccacgcctggccatttttagcttctgacttggtgtgagagacgcgagacccttcctttcatctgaacactttaaaggctattatagggttattaaccggcctaattttaagacagttgtgtctcaaggaatagagaggtctgaggagaggaaaagagatgggaaatagtcagtagctggagcagtcagaacacaaacatttatagactgaattcaccttcttagatggacatggtttgtggttccccaaaactatgataatgacacccaaaatcactgatcacgaatcataacagatataatagtctgaaacgttggtcacattaccaaaatgtgacacagagatgaagtgagcacacgctgttggaaaaatggcactgataaaagacttgctcaatgcagggtcaccacaaattctcaatttgtaaataaaaaaaccgcaattatctgcaaagcacaataaaacgaggtatacctatacatgcaacaaacacaaaaccggtaaactcaaaattcaggatgggcaaggaaatgaagtagggaaaggaacacacacaggaagcagaggtgactgaactggtcaggccaagtctcctcaagttgagtgacacaaatcagaatcactcaaaattgaaaggctaaccaaaacactgcaccgtcaatcacctacagcaccttcagtgaagtaagagcgctgcagggtgggtaggagcaattccctctgctgtgcttgaccctcatcagtaacaagcagagctaactctgacaggtggatggagtgcttctgctacccaatctcactgacagggaaacaggatcaaagattaagcaacctgctccagatcactgccaatgtctccaaattccagtgggtgaatgtccattttgagcttcagtaccactagtcacagtggtactcatctgtgcacctgcttaggtagtatattccattttcagcaagttctaattgcccatataaaacacatcagaggtacagagatctttaagcacaaaatgcaacactgagtctatctcatgccctttccaggacaagacaatgccaaaaaggaaaaaagcctgggcgcggaagtgagcacctatagtcccaactacttgagaggctgaggagggaagaggatgtcctgagcccaggagttctgggctatattgcatggtgccaatcaggtggccgcactacgtttggcatcagtgtggtgacctccaaggagtgggtactaccagattgcctaagaaggggtgaaccagcccaggtcggccagatgtggtggctcacacttgtaatcccagcattttgggaggccctggcgggcggatcgcttgaggccgggagttcgagaccagcctggccaacaaggcaaaaccccaactatattaaaatacaaacattaactgggcatggtggcgggcatctgtaatctcagctactcaggaggctgtggcacaagaactgcttgaacccgggaaacaggctgcagtgagccaagactgtgccactgcactccagcctgcacaaaagagtgagtgagactccgtctcaaaaaaaaaaaaaaaaaaaaagttgcggggccgggggggggggggggggtgggtcgcgtagtgaagaaaaaaaagaaagggggcaagtcaaaactcccatacctatcagcagtggggtcatgcatgtgactcaccactgtactccagcctgggcaacacagtggagacctcgtctcttaaaacggtaggttggctgggcgcggtggctcacccctgtaatcccagcactttgggaggcccaggcgggtgaattacgatgtcaggagttcgagagcagactggccaatgtggtgaaaccctgtctctactaaaaatacaaaaattagctgggtgtggtggcgtgcacctgtagtcccagctactcaggaggctgaggcagaacaatcgcttgaacccaggaagcggacgttgcagtgagccaagattgcgccactgcactcccgcctgggcaacagagcgagagtctacctaaaaaaaaaaaaaagtaatagtataagctgtgacactggatgaagaaagtggcaaaaataaaaatttgtaagaaaaaaattgaggacataaatttttaaaaagggggcaaaaaacataagctgaaactccttaaactttaaacatctgggctgggcgcggtggctcaaacttgtaataccagcactttgggaggccgaggcgggaggatcacgaggtcaggagtttgaaaccagcctgcccagcatggtgaaaccccgtctctactaaaaatacaaaaaattagccgggcatggtggcacacgactgtagccccagctacttgggagcctgaggcaggagaattgcttcaacccagcaggtgaaggttgcagtgagccaagattgcaccactgcactccagcctgggagacagagcaagactccatctcaacaaacaaacaaacaaacaaacaaaaataaaaactttagggccgggtgcggtggctcacacctgtaatcccagcactttgggaggctgaggcgagcagatcacaaggtcagatcaagaccatcctggctaacacggcgaaaccccatctctactaaaaatacaaaaaattagccaggcgtggtggtgggcgcctgtaatcccagctactcgggaggctgaggcaggagaatggcatgaacccaggaggtggagcttgcagtgagcagagcagagattgtgccactgtactccagcctgggcgacagagcaagactccacctccaaaaaaaaaaaaaaaaaaccaacaaactgtcaatctctggtaggtttaaaaggaatctttgctatcatctaaaagacaaacaacaattgtcggcaaagatgtggagaaactggaaccctcatatgtccagcaatgtaaaatggggcagccactgtaaaacagtctggcagttcctccaaaaggttaaaacataaataatgaatgtcccagaaattcctcccctacgcatatgccaagagaaagggaaacatttctacataaaaagtgtgtgtgggcactcacagaggtattattcataagagccaaaaactagaaaccaaaatatccatgaactgatgaacggatagtgtcatttctaaggatacaaccagattttctgaaattgggggtaggggaggggaatcaaagatgtttccttctcaaggagcaaaccgggtagtgtggcaatcaattctgaggctccatgctgcccttccaaggactgaggtactgtacccaagaatcactgtgccggagtgaaggacaaagcaatcaagtcatccaggcacaagtcacagaacactgagtgcggagagaggcagagcttgccaatctggcttcaccgggggctcctctcacctgttctctgtctgctcaagagttggtaagcaccctcgcacttaaaacattccaaaacccaagcttttgtggttacattctgaggcaatgcatagagaaatgttaattctgtgagccttttcaaggtgacatcaagacagaaactacttgctgtggaaatcattgtacaaagtgggtaggagtgagaagcccactgataggatgagtcccctgggagctgatgaaagggtgagatccaatccatttttaaacagtccttttttttttttttttttgaaagagagtctcactttgttgaccaagctgaagtgcaatggcgtgatctcagctcactgcaacctccgcctcctgggtgactggaactataggagcatggcaccatgtccggctgatttttggattccccccccccccccccccccccgaaggagtctcactctgtggcccaggctggagtgcagtggcgcgatctaggctcactgcaagctccgcctcccgggttcacgccattctcctgcctcagcttcctcagtagctgggactacaggtgcccaccaccacgcctggctaatttcttctattttgagtcgagacaggacttcaccgtgttagccaggaggtctcaatctcctgacctcgtgatccgcccgcctcggcctcccaaagtactgggattacaggcgtgagccaccgcgcctggccaatttttatagtttttattagagacggggtttcaccatactggccaggctggtctcaaactcctgatctcaggtgatccacctgcctcggcctcccaaagtgctaggattacaggcatgagccaccgtgcctggccttaaacagtcctttaggcagtcctgaaagacacctggctgcaccactgtttgaaccatctcccgtacctttgtgcctactcttcaccgatgcccaatatccatccccaaaatcagtttccgtgtggaggcaggatatggggaatttaaagcccctcagcaggcttccgcacccacgttcttagttctaacatgtgttcaaaaagtaagcaagatggccaggagcaggggctcatgcctgtaatcccagcactttgggaggccgaggcaggtggatcccttgaggccaggagtttgagaccagcatggccaacatggcgaaaccctgtctgtattaaaaatacaaaaattagccaggcatggtggcaaggggcctgtagtcccagctacttgagaggctgaggcacgagaattgcttgagcacaggaggcggaggttgcggtgagtcgagatcgtgccactgcactccagcctgggcaacagagcgaaactctgtctcaaaaaaaaacaaaaaaacaaaaaacagtaggcaggtggatatttgcacactcatgttcactgctgtattattcacaacagccaagaggtggaagcaacccaactccatcaacaaaggagtggaattctgacatgctacaacacggatggacctggagaacaggttattatgcttagtgaagtaagccagtaacaaaattctaaatactgtctgaatcggccaggtgcagtggctcacgcctgtaatcccagtactttgggaggcagaggtgggtggatcacctgagatcaggagttcaagaccaacctggccaacatgatgaaaccctgtctctactaaaaatacattaaaaaaaaaaaaattagccaggcatggtggcgggtgcctgtaatcccagctacttgagaggctgaggcaggagaatcacttgaacccgggaggcagacattgcagtaagccaacatcgcgccattgcactccagcctgggcaacaagaatgaaactccatctcaaacaaacaaacgaaaaatactcaacaaacaaaaaatactgtctgattctacttatatgaataactatggtagtcaaactcatagaaacagaaagtagaagactggctgccacaggctgggagaaagaaggaaaaggaagttattcgaaggatacagtgtcagctttgcaagatgaaaactttctagtgatctgctgcacgacaatatgcatatagtttacactgtaaaatggttaggatgttgcattttatgttttgaaacacatgcgtgtgcatgtaggcaaatgggttcagccgacattcctcaatactaacatgggaaaatgccctcacagggctgggtcaaatgaaatgccacacaaagcaagtgttcaataaacacctactactaataaaagcaagcatcggccaggcacagtagcttgtagctcccatttgtaatccctgcagtttgagcggccaagacaggcacattgcttgaactcaggagttcaaggccagcctgggcaatgtggtgagaccccatctctactaaaagtacaaaaaaggggccaggtgcggtggctcacacctgtaatcccagcactctgggaggccgaggcgggcagatcacctgagatcaggagttcaagaccagcctggccatggtgaaaccccgtctctactaaaaatacaaaaaattagctgggcgtggtggtgtgcgcctgtaatcccagctactcaggaggctgaggcaggagaattgcttgaacgcgggaggcggaagttgcagtgagccgagatcgcaccattgcactccagcctgggcaacaggagtgaaaatccgtcaaatcaaacaacaaccaaaaacaggctgtgcacggtggctcacatctgcaatcctagaactttgggaggctgaggtaggtgaaccacctgaggtcaggagttctagaccagcctggccaacatggggaaaccccatctctactaaaaatacaaaattagccgggcgtgggggcgcgtgcctgtaattccagctaccccagaggctgaggcaagagaattgcttagaagccgggaggcagaagttgcagtgagcggaggtcatgtcattgcactccagcctgggtgacagagcgagactctcaaaacaaaacaaagatgtcaggcgtagctactcaggagactgaggtgagaggatagcttgagactggagggtggaggttgccatgagccaagactgtgccactgcactccagcttggatgagggagaccctgtcttcaaaaaaaaaagtgtgaattgtggccgggcacggtggctcacgcccgtaatcccaccactttgggaggctgaggcgggcggatcacgaggtcaggagatcgagaccatcctggctaacacggtgaaaccccgtctctctactcaaaatacaaaaaattagccgggcgtggtggcggacagctagagtcccagctacttgggaggccgaggcaggagaatggtgtgaatccggaaggcggagcttgccgtaagccaatatcgtgccacttcactccagcctgggcaacaaagcaagactccatctttaaaaaaaaaaaaaaaaaaaggccgagcggtggctcatgcctgtaatcccagcactttgggaggccgaggcgggtggatcatctgaggtcaggagttcaagactaagcctggctgacatggtgaaaccctgtctctactaaaaatacaaaaaaatttgccgggcgtggtggtgggtgcctgtaatcccagctgctcaggaggctgaggcaggagaattgcttgaacccggcaggcggaggttgcagtgagccgagattgcgcactgcactccagcctgggcaacaagagcaaaactccatctcaaaaaaagtgtgaatgtaatgatttagtaagaactgtttaatgtattaatatttatatttcataatctgtaatcatggagtaaaagccaagcaggctgcatcacttgccctgcagtctcctagcacatgaactaatgggcaggcaggagggtgtgcatcatccaccttgcttaccgctgacctccagcacccagacaatccctggcactcagcacaagtaactgctcaataaccagaaacatcaagtgcttgccggaaaaactccatgatgagggagagggaagattacacagaccaaatttaagaatctctgccttaggaactcaggggctatcctgcctgaaccatcgataggggatattttcaagtcacctcaaccactgcttgactcactccaggtggacccaccactggcaccttctagtaccacagctcagccttgagtatgtgcttgaactttcgttcgcacttcacattttccacacacaaatataatgtgccaaaatgagccagtcctgctcccaaaaccctgctcacaaaatggaggacgtgagggtgtggacgcatagaatgaatgaaatgaaagatgtcagacaaagcaaattccaaagagaagtgggaaattttctagcctccaagaacagaggacaaaactattaaacatgatacttatctaggtcactagagttcactctaggacacattgttttggaaagaaaagcccttcaccattccccagattaaagcaaattcactaatctgtgttcttactacacaggggcctggctttctcaagtctgggaccctgctgggactcttatttccgacgtcctattgggaggagccctcacatccatcctcctggagatgcccaatgcccccaagtctggtctagatccacccttgcattccaggcttgcacatccaaccgcttcaatgacagcatccatgaggatgtcgacaagctccacatggtcaaggaactaaagtgaccccattttctctaaaacctgtcaaaacagggtgacaacagccctactgagtgttccaagcccccttcaaaggcccacttaccacaggggacagtggctaccaggctggataacccagctgcagaacagtcccaacactgcagaaagtccccctggacagcactgctttggaaattgggtaatacactgtaaaataagtaaggtctagaccagaccttggaagatggaggaaatggagtttggggggatgtctggaagaagaatcaaatgaacggaatgaggcaacagtgtgtcacagaacccaggagcccagggtgctacatgacaggagtgtaggtcttatcctatatgcagtgcggtttcagggtagcataatcatgctgtagtcatctattctattttgattgtgtacttttcaactagcttactagtagcactgtgcgtggagtttaaccacttctaccattttctctggactggctttgttttttttttccccccacaggtattcagagccaatttcctactgaatgagatcacgtgtcattttacgaagtcaaagaaaagatgtaaaagtaaaatccttcagggcacacctgttaaatgaatcaccacctttctagcacaggggtattaggatcttgtgcaacaatcaccaccggagacattaggatccctgaaacacctgcctcactcactgtcatgtctgcagtgaatgcagaacagtgtctgattaccaagtacatccagcacacgcattggacatggatgttgaccgagttccacttggtgtgcctgaggcaggcaggaaattctcttggaaacagaatccttaaggggattgggggggggaagcacccatgagctagaactcaattctaccctacagtaagcagcacttcaagggccgggcatggtggctcacgcctgtaatcccagcatgttgggaggaccaggcacgtgaatcacttgagatcagaagttaaagaccagtctgaaaatatagtgaagcctcatctccactaaaaatacaaaaaaaccagccgggcgtggtggccggcgcctgtagtcccagctacttgggaggctgaggcatgagaatcacttgaacccgggaggtggaagctgcagtgagctgagatcacaccactgcactccagcctgggtgactctgtctcaaaaaaaagcacctcaagaccgagaagcggccgggcgccatggctcatgcctgtaatcctagcactttgggaggccgaggcgggcggatcacgaggtcaggagatcaagaccatcctggtctaactcgatgaaaccccatctctactaaaaatacaaaaaattagccgggcgtagtggcgggcgcctgtggtcccagctacttgggaggccgaggcagaagaatggcgtgaacccgggaggcagagcttgcagtgagccgagatcgcgccactgcactccagactgggcgacagagcgagacaccgtctcaaaaaaaaaaaaaaaaaaaaaaaaagactgagaagctcaccataatcctgaaagagtatccagttcacaccataattttaacaagcctggggcacctggactaaagacacactccagtttacttacttccccccaaccatcccgcttctatattcccagacttgctctgagtagcaaaaggataaatggaagtgaaggcccggagcggtggatcacctgagatcaggagttcgagaccagcctggccaacgtggtgaaaccctgtctctaataaaaatacaaaaaaacagtcgggcatggtggcgcatgcctgtaatcccagcaactcaggaggctgaggcaggagaatcacctgaacctgggagacggaggttgcagtgagctgagaccacaccattccattccagcctgggcaacaagagccaaactccatctcaaaaaaaaagaaaaagaaaaagaaaaaatagaagtgaaaccaaatcaaggcaacttggttctctagcggaaactttttgaagatgaggttaaattccactcttgtgaatgtcttcatgagaaactcctcaggagggaagcactgtttttactgaccagatgtctgggtgaaaaggagacctgtccagtcagcattctgcatccctcttctgatcatcccctcacactggtgagcacctccaagggacaggtacttgctttcagacctgtccaggtctctttccaaacctctgctgtcctcattgaagaaccagactcaatgctagcccccttcctatgctcccagttggaaggtctcctccctctcaggctgccttgcctggacatcttggaaagcacttctgagctctaccctgtgctcactacgtatcatccaaaccatctgagttcactgagaacaaagctgaatatggtggactcccacagcttatgccacagcagacaagagctagtgggctctggacacaagtgctccaagtacttaccaactctgtgaccctgcaaccctgcccaagtgacagctctccaagcaccaccttccgtatctgcaaaccgggatgatactagtgcccagtgtatatggttgttttctgaggacttaaggaatgcgtagaggcttagaaatattcgctaaaacagaacaatcagcagcagtgtgctcaagctcagggtctggggagggcaatgtggcagtgaagtgaccaagtctgcagctccctacagcatcatggttgacacagaaactggactgatggatgtctggctccaccactttaaaacaggcatgcagtaagcaatagaaaaaaattaaggaagatgtcaagcatccagtcagaaaatgtagttttatactttacagggaagcctattcataggcagctatttgctacaaaccctgaacttttcagagtcaacaaagataaggactgctttaaggtgaacaatgggagtggggggtggtgggcaaggggtggtggtggtggtggtggtggtcaggaaggtcaggggaaagagacacaggccagaaagggtaaaccagctctcacaagtgcaaaggacatcagttaccagagcagacaggcctaaagactgaggataagcaagctgcaggcagcatgctacgcaactcaaaagggcccaatagagagaccgctctaacactggtaatttaaaactgcattcctgggattacagatagctgagctattattttgaaaaagatgaacacgaaggtggtattatttccaggcagctaatctgtcagctgaatggtttcctactgtcaaaaggaaaacatatgaagagtctcatacacacacaactctattacttggcagctttttataactgaaagtgcttcagagccaagtaatttttaatgaagattacaaatgaaaacaacctacacacagatagcaccacctttcacagaactctttcacgcacatgatcttatttctcttaattacaaaatagaaaggggaaactgcttaagttacaaaaatcatgcctgtacagtaagactgcaattcaactgagcagagaaatgggattaataaaagccaagaccaatggtacatgaatgagggaaaacatccattggcacatacaagtttaatcttcaaactatagagattggggcgggggggtgaaggagtctgtaataggtgctattcttagaagtaataagagttcttttccatcctctgactcaactctgccccaattacagaagtatgaattattcaagtttatggtattatatttcctattccttccaccagacaaggatgtgaggagaaagagagtggcactgtgtacactgcttggtgtagcatgtcgatatccctaaacgtaagcatgtcatgctgaagaatggtagtttcccacaagctttcttcctcaatctgcaggttccagtgcatgcgtaagcaaatgtcccgcagcacagggcacacattaagccacgtaagggaccacagcataaatcttgtaagcctacccacatccaacactaccacataaataatgaggctggctaggaaccattcagttaccttctggagcaaaggctccataccaacagcaaatcatggagacagtttacaaacagcagcagcttcagtgtagagccctagttccaagaccctcatctgcggcctttgcaacagacccattctggtacattctcaaattccttatccccaggaaagagcacaggctgacaaagttgggggcacaggggccctgggaaggttcacatcactgttgacacgttacctgacaactctgtgaaacctctggaggatttttgcaaggacaaaccaaaatgggtgatccaccctgtttccaagtcataaagttgtaaatgtctagaaaagtaagatacatgtgaaaaccagcctggcacagtggctcacctgtgtaatcccagcagtctgggagacaaagaaggcaggaggcttgctcaagttcaggagttcaagaccagcctgggcaacatagtgtgacctcgtcccttcaaaaaataaaaaaaaggctgggagcggtgcctcacacctgtaatctcagaactctgggaggccaaggtgggcagatcacttgagcccaggagttgcagcctgggaaacatggtgaaaccccatctccacaaaaatacaaaaaattagctgggcatggtggctcacacctgtagtcccagctacctgggaggctgaagtaggaggatcacctaggccaggaggccgatgctacagtgaatgactgcactccagcctggatgacaaagtgagacctcgtaccaaaaaataaaaataagctaggcatggtgacacacacctgtagttgcagctactcagcaggctgaggtgggaggatcacttaaacctgggaggtcaaagctgcagtgagccaagatcatgccactgcactccagcctgggcaacagagcaagaccctgtcttaaaaaataaaaataaaaagtattcaaaaccatcaagaggcagggtgaagtggctccgcctgtaatcccagcactttaggaggcctaagcagatgaactgcttaagcccaggactccagaccagcctgcctaagcaacatggtgaaaccccgtctctacaaaaaaataccaaaattagatgagtgtggtggcccacacctgtagcccagttacttaggaagctgaggtgggaggattacctgagtttggggaggctgagactacagttagctgtgatcatgccactgcactacggcctgggcaacacagtgagactctacctccaaaacaaaacaaaacaaaaaagccatcaatagccctttaaccaacatcgtaataaatttttcttccacagagtaaaatcaggaaattcattctggtacctggtctttagagttcaatgtttatgcctatgtgcatttttgtggagagaggatccaaagcatctgtagcatactcaaggagacctccagcctcctcttaaggagtgatgatctagagagaagcagggtcagtcccattcttagccactagactcaattattttgtgtctcctaaaggaataatatttccaacagtgagaactgtaggaaaacgattattacagtagaacttaacacttgtttttgattatggaaatctgaggaggcttttcgtaatgcttgaggaatgccaagcagcagactacgagaacttgagtatggaaatagcttagcaaatagcaaaattacaactgtaccttttgcaggcacggaagatagatgaatccagtctcctgaactaacaatagttactagtaataacaatataccatacagattacataagttatataaataacaacttgttatttatatggaagagagacctaatgtgataaacacaatttcaatcttgtaagcatttatttaaactttatatctacctggtctcttatccaagattttcctgaacactttaagctggtctcactcctgtgctcccttcagggctgttttcccgccaaactggatcattcagcccacccaagtaactcctgagacttggcttgacttctcccagagctccttctatgcctgacacaggtaagatacacagtgtctttcatttcatcttctacgaaaatatttgggatacacacatccttaactatcttcattctaccctttgtgagtaactcaattctgaactgttttccactaattctggtttacaaactagtatggaaacctcctttcagccatccataatttcttgctccaagttcgggggtacattttacttttagtataggactctgggccaggcatagtggctcacgcctgtaatcccaacactttgggaggccaaggcggatggatcacctgaggtcaggagtttgagaccagcctggccaacggggtgaaaccctgcccctactaaaaatacaaaaactagccgggcatggtggcgcatgcctctaatcccagctactcgggaggctgaggcaggagaattgcttgacccaggaggcagtgagccgagatggtgccactgcactccagcctgggcgaaagagcgagactccatcaagaaagaatgggaaagggaaaggaaagaaaggaaagaaaacaaagaaaaaagaaaaagagaaagaaggaaggaaggaagggaaagagggaggggactctgtccattggacaaagcatcccatctagcatgcctcttatcaacaagcgagatgctgctggagctaccacttgggttgagggaatggagggcagagaccagctacaggcgccatgcttgaggcaagccagttaagcattcccattctgcacatggtcagagatgggcaatgatccaacctagaatccactgccatcagaaagcactactgggaagactcactcttgaccttgaggtcagaacattagtgataaagaacaagtactgaagtcattgtggagcccttagattcaactactcttgagcctcatgttgcatcaggcaacaaactcccttctgtttcagctaattttgtttatttataccagagaaagacataagtaatacaaccatttcctcacagtcatctgaataaagttaggagaataacatctgagaataatcgacaagtagcttaccacacatgcacacaaatgacactctacatacttcttgtttcacctgtggcaaactactagaccttcaccactccatgcttctccaacttccctcaccctaccccctacaaagcttctaaaacacagtgggtacagggaagaaacgaaactaaagatccatgctttcacctgctactagaaagcatatccaggacagtcatcattgggcaaatgacaaagaaacagatcacaaaatggcacatacatacacacacacacaaatcaaggtattcacaattgccatcaagtagcatggaaaccaatgtaattcaactcctctgacatgacccccccataagaaacacattttatcatgtacacaacacctaagatcaaagcaaaggttttatgaaatatccttgaaaattgtgacaccctctgacatttcccttttctcccctatacaccaattgcaatccaccatatttgtttcatgacccatggttttgttttgttttgttttgttttcttctgagatggagtctcgctctgtcgcccaggctggagtgcagtgacacgatctcggctcactgcaagctccgcctcccgggttcacgccattctcctccctcaagccatgccatgacccatggttttaaaaacacaaagaaagccaggcgcagtggctcacgcctgtaatcccagcactttgggaggccgaggcgggtggatcacgaggtcaggagatcgagagcatcctggctaacacggtgaaaccccgtctctactaaaacatacaaaaaaaaaaaaaattagccaggcgtggtggcgggcgcctgtagtcccagcactttgggaggccgaggcaggcagatcacgaggtcaggagatcaagaccatcctggttaacacagtgaaaccccatctctactaaaaaatacaaaaaaaaaaaaaaaaaaaattagccaggcatggtggcaggtgcctgtagtcccagctacttgggaggctgaagcaggagaatagcgtgaacctgggaggcagagcttgcagtgagctgagactgcgccactgcactctagcctgggagatagagagagactctgtctccaaaaaaaaaaaaaaaaagaaaagaaaagaaaaattagccgggtgtggtggtgggcgcctgtagtcccagctacttgggaggctgaggcaggagaatggcgtggacctgggaggtggagctttcagtgagctgaaatcataccactgcactccagcctgggtgacacagtgagactctgcctcaaacaaacaaacaaacaaaaatacaaagaattattttcttccaattaattgggaggctgaggcaggaggatcatttgaacccagaagttcaagtccagcctgagcaacacagcaagactccatctctttaaaaaaaaaaaaaaaaaaaaaaaaaagaactgctctctcttaaaatccagattctgatcaaatttctctggaatcaaaacctatgcgccctactttatatatgaaaaactgaggctagagtggttaggcaacgggtccaaggacacaggcagatgtcccctgctgagtgtgccccagcagcccagtatggcccagactggcatccaccactgggctggcaggttccacctccatgtagtttttttgtttcaactctcatgataatgatctgctcccacaaaatatgtttcctcaaacagcatggaaaattttcaagtatgaagtccccaaatttttctcaccctcttcccttttctttacacaaaacaaaactttgaaggctaatccacccatagacatgtatgtgttactgcctgagaaggaacaactgcagacattagcaacacacaaggacacgagaattactaattcacgtttctgaaaattgtgtaataccaagcccaacacctctcccctggtgctggctgacaatgtaccagtgtctcctgactaacagcagctaggaacaaataaagagtttcagccttgagtggagaccaagacaaggaaggtgaccacacatactaagtaggaagggcctggatagcatttctcacactttttcaggcagaaagcaaagccagcactcctcggcccccatctttctcaacagtcccaggcatctttatacaattagacatgaggcccaggtcagtacccacatggtcccccttttgtcactgtgcaggcacactgatcccattttacagaagagaaaactgaggcttatggagacgatgtaactcccctgaggtcaaggccagaagggggtggggctgggactgcacccaacagtgaactccatggtgttctctctcctctcctgctctggtacacggctccacccaagcccaaccaatgctgtctgccacagcccaaggtcccagaaacttcctacactgggcagaacaggctaacacatgcctggggaggggggaaggggaaggatcacacaactgtctacacctaggataaacgaaaaatagaacaaatgtcaaatttattcacattctcttaatttgaagctaatgcttagattatgtgaccaacctctaaagaaaatatatctttcaattgcatttcacacaagcaaaaggcaacctttgtggaaccggatcccaatgacgcctagtaagtaactggacttaactggttcttctggtcaaaaggcccaaagtcgatcggcagtatgccagactcccagtcaggacctccacacatccagctgccaaaattactctaccaaacttttccagggagaccttacaccttcctggggaccagaatcctttcaccaagcccagatgccaatacaatcagaatcagagccaatggaggccagaaaggtatggaaagatgttccagtgttctggaaaaactttggcccaccagtgccttctggctccctgaccaagtctttgtgttcagataaccaggttttcataagatgggtaagttacattttaggcttgaggatacactgagccagcttcccctgctggatcatttccccaaactctgcagcaaacatcccagggtggatgcccccaaagctgctgcacctccactaatcccattatcactgctcttaatctcattatcagataaaaacaaacacaatccctctttcaagcacctcttccactggtctccactcagagctcacttggaagacgtggcacctctggaaggcacctggtgggctgtagtgtcacccagtaccatgccctggatcagctggtgcacctcctggctgtcagcagctctactctgacccctggcttcctcttcccacttctattcttcaccttgggcaaggacggcagtagctaaccttgagagggcacagcactgctgccaagccctgtgctgtgtgtcctctaaggcactgtctcattttaacctcatctgaaagatgggccaatgaagctctgggaaggctgagtgacagaatgaatgttacacagcaggtagcagggccaggattctaaccgaggcctgaatgtgccgtactggtgttatcagtctttggagcaaggcagcaaaaatgagataggactggatgccaagaggctgcccaagccctccaaggtcaccctccctagagcattccagttaagactggactgggctcgtactgccgggtcaggagacttgatttcaggaaacaaagtccaactctgggcaggagagggtagaaaagtcaaagggcaagagcctagagacacttctacttctcaccacattaaaaaagacacattttgttttcatacatcatcatttgtgggggaaaaaatgtttaaaatctcacccctataaacaagaccctgtcaagctctgattggagaaatggaaatacatgcaacctttccagaaaataagttaaatcaagttttcaaaaatatacacctcccaattcaaagatgaaaaaagagaaaacaccagatgaagtggctcacacctataatcccaccactttgggaggctgaggcgggcggatcacctgaggtcgggagttccagaccagcctgaccaacatggagaaaccccgtctctactagaaatacaaaattagctgggcgtggtggtgcatgcctgtaatcctagctactaaggaggctgaggcaggagaatcacttgaacccgggaggcagaggctgcagttagctgagatcgtgccattgcactccagcctgggcaacagagcaagactccgtctcaaaaaaaaaaaaaaaaaaaaagaaagaaagaaaaagaaaacttggaaatcatgtccaaatgtccaaaaatagcagaattaagttatggtacattcatacgacagctaagcagccagttaaaacgaaacattttggaaatgttcacaatgtagcattaaaaaaaaaaaaaaaaaaaaaggccgggcgctgtggctcatgcctgtaatcctaatcccagcactttgggacgccgaggtaggcagatcacttgaggcgagaggttcaagaccagtggggacaacatggcaaaatcccatctctattaaaactacaagaaattatccaggtgtggcagcatggggcgcctgtagtcccagctacttgggaggctgaggcacaagaatggcttgaaccggggaggcagaggttgcaatgagccagtctctgcatgggtgacagagcaaagacttcagcataggtgacagagcaaaactctgcctcaaaataaataaataaataaaaattaaaattaaaaacaaagaacttcactacaaccaaattgtgttactcagacaaagacaaataactggaaggaaagaaaatgggattaagagatcatttttaaccatcattttaacattctactttttccaaattccttaaaatgaccatgcactacttttgtttaaagaaaaagccttacaatctccttttcaaatgatgtggaacaaccaatgttattcctcttcaggacgaggacaagaatgggacagacggctgctctgccctcaccctgactcagaactctcttcctctgcttcttcagagtggactacattccatgaattatgctaggacatgtgcacgtggtttaattgaggttggtagcctgtcgagactgaaaacaaactgctttaaaacatcaccctttacaataaaggaactgcaagtttggggtgcatctccgagactgttctctatggagcagcatttcaaactgttctgtaaccatgcacaatgtaaaaaaccaaacggtgaccaaaccatgaaggcagaatacaacatgtcaacatgctgatatccttgcagttccacttcctcattcatttaaacagttactcagtatcccactaagcttttaaccattctacctaagtactagaaacatcaatgccattaaaaagtcgctgtgcaccctcaaaaacttaaacatagatatatgacccagcaattccactcccagatatctgtcccagagaaactaaaacctgtacgcaaaaggccaggcgcggtggctcacgcctgtaatcccagcactttggaaagctaaggtgggtggatcacttgagctccggagttcaagaccagccaggccaacatggtgaaaccccatctctactaaatagtaaacacaaaaattagccgggcatggtggcaggtgcctgtaatcccaattacttgggaggttgaagcaggagaagtgcttgaacccggggggtggaggctgcagtgggctgagatcgtgccactgcactccagcctgggcgacacagcaagactccgtctcgaaaaagaaaaaaagagaaaaaaaagtacacaaatgtatttttaacagtactattcacaattgccaaaaagtgaaaacaacccaaatgttcaccactaatgaatgggtaaacaaaatgtagcatagccatataatggagtatcattcagttataaaaaggaatgaagtactgattcatgctacacagcaagaaccttttggaaacagtacagtgagtgaaagatgccaggcacaaaaggttacatattgtaggattcctgaaatatccataacaggcagatccatagagacagagagtagatgagtggcttccaggggcaaaagtggcggggggtgggcaggagcatggggaatgataggtaatggatttcttttggggggggggggtggaaatgtcctaaaattggttgcagtgatggctgcaaatctctgtaaatacatttaaaaactgatgattgtatcatgtataacaacgtttatctcaaagctattattttcttaaaaagatgtttggtaggattttacaataatagtatgctcaaattatacataattgatattcaataaacgtggaggatgaacacgctaataataaagactacgcatattaaagtcattatacaaatatctttcagtctttccttgtacatagtaagggctcaaggactaattgtagagacagattggccaatcatgcacacataaaatcaaaatatttaaaaatgtgttcaatgtttaaaaaaaaacttaacaggtttttattgacaacatgagattcacattaagaaatgctacccatatgtgtttattgcccacttcatatccctcttgaaaatacttttggcaggtcagggttgaaccacagcgcaaagccactcaccgcacttcaaactgctaagtgggaaatgtccagtagtgcatggaaacacactgcatgccaggctgctcggactaataagtttactacaacaccgagggaccccagcgttatcttagttgaaactcacattccttgtaagtcactaccgaacaattatgtccacggctaacaacatttttaaagcgggattatttgcatttggcattacggcatgcaaaattcttgctcaattacttctcccgtttattcattgagactatttaaggtgctcttctaggcacaagatacaacagaataaaacaggcaaagccaagcaaacaaaaccctgccctcatccaacttacattctggttttgttttttgttttgggacggagtttcgctcttattgaccagactggagtgcaatggcatgaccttggctcaccgcaacctccgcctcccgggttcaagcgattctcctgcctcagcctcccgagtagctgggattacaggcatgcgccactatgcccggctaattttgtatttttaatagagacgtggtttctccatgtttgtcaggctggtgtcgaacttttgaccccaggtgatctgcccgcctcggcctctcaaagtgctgggatcacaggcgtgagccaccacgcccggcgcattctgctttttttttttttaagttaacaaggaaattttatctttccaaactcatctcttatgtattaaatgtcagcaccagcaaggaattccccacaattctcacctcgcaaatgtacactcttttctagacaccaaaaatcacaaagatttatgaaacattaggagctccaatgacaagcttatctttcctttttacagatttgccaggaacataaagacaaacatggtctactctacaagtttattcaaaatcagaaaccaaaacattttacattcacaaaatacaacacactatacagtaggttgtcagaagcagatttaacagcccagggtcttcaaatcactgaggtgccaaatggttttttgctttaaaaacaaaacaggccgggcgcagtggctcatgcctgtaaacccagtactttgggaggccgaggctggcggatcacgagatcaggagatcgagaccatactggccaatatgatgaaaccccgtctctactaaaaatacaaaaattagctgggcgtggcggcgcgtgcctgtaatcccagctactcgggaggctgaggcaggagactcgcttgaacccaggaggcagaggttgcagtgagccgagatcgcaccactgcactccagcctgtcgactgacttcagactctctcaaaaaaataaaaaataaaaacaaaacaaaattcaatctcttaaatctgtaaatctgaagtcattcaataacctgaattgtgaaacaagaaaatattgttacccccacctcctaaagcaaaagtgcaatttagtacaaagatcacaacaactggctcaaaaaggcaacttttagaaacaaagtctaaattcctttaaacaattcaataatttagtggaaatgttactaagtggccaatgattctcgttattcttagctaaaaattttccctcgctgtcctccagactagcgaagctaggcatatagcaccccagaacagccaaacaatccttaaaactcagcagctaccttcttatctttcatccgtaggcaaagttccttatcttcagcaattccactgggctgactgctagcaagatactcggaggtggactcgactccttccaattaagaccaactaaagccattctgagaccggctaactccagtttgagcctttaagatactatgtttcctaccaaagaaagaggtatggtggataacagagcagcaatacattttgtttcagattaggctttgccttctccatttgatcaatggaaaccctgagtggtttatctttccctggctgaagtttttggggggaagcgcttggttatctacaacgcatcagtgataagataaaaagataaaaaacataatccccacccaaattaaaccgaaataaatgctttatgaaattattggcggccgggaacggtggctcatgcctgtaatcccaacactttgggaagccgaggaggatggaacacctgaggtcaggagttcgagaccagcctggccaacatggtgaaacccgcgtctctcctaaaaatgcaaaaattagctagatgtggtggcgggcgcctgtagtcccagctactcgagaggctgagacaggagaatcgcttgaacccaggaggcagaggttgcagtgagccgagatcgcgccactgcactacagcctgggcgacagagcgagactccatctaaaagtatatgtatatattggcaagatcataaaacagattgtgccatcaaaaactttcttgaaattaaaaacacattcataaatccttttgagtatcgctttctttacaacttccaaagacggtagggaacttgacagctccattcacaaaaaactcccgaccattgttacagccccaaagagccactggcttacgaggtaaactgcgacttggtttttggaaccacggactggtagagccctgtcgaaggtaagcaaagacattccaattctcgtgaggcatacattccaaggggtcactagcatccaacacacacgcagagaaatgaacccaagaccagacaccccaccaggctgcacgaaacgtaaacaagtaaacaagcaaataaaaatcttaaaaaaacaaagcgtagtcttgagtaaaagggaggtcagccacccaggagaagcacatgactcatgcaccggcctgaactaaagtatttacaccgtccactacaacagagtggggtttcccatcttcaagcaaacccaagccttgggggcatctcagccgagtgaagccatgctatttccgtttgggaggagggggatcattttatttcgctgaatcacaactcccccacatccccaccccaaatcaccacaatcaccaccaccacacaacactgcaaataaaataggccgttgcaaggacgccggcgagcacggaccgagcaaaacaaagcgcccagcaaggggctgccaggctgagagtgggtgcgtcaagcgggccaagctcgcctccagggcaccgctcccgccctgaggcctggcctcagaccggcgtgcagccgcagccacctccctccgcaggggacctgcccctttctccgcagcactccggggaccgccgggaaggtgaagagatgggggtgggggcgcgctgccccggcccaggcaaaacgacctgggtgccagaaggagagcgcgccggccccggcccacgtgagcgccgcggccgagcccgcctagaggaccgcggaccgggacagctgcgctcgcggcccccgcgccaggccgggacttacccgggccgggcgcgccgcggaccccgcggcggccgcttcctcctcctcctcctcctcctcacttaacaaaatggcggcggcaggaagtgccgggcgcctcggcccgccccccgcccgcccccgaccgccggccccgccgcggcgcccgcgccccccacccgcgccccgccggccagcccaagcccgggtccgacggcaccaaaggcaggacagccgcgagcgaccccgccgccccgacaccaacggcgcaggccgccccggcccggaacgaacggcgcgggaggcccgcaggcccgagcccgcgtagccccggcctccccgcccccgcgccgcgcggatggcgtaggtggcggcgccccggccccattacgcaatgcaggttacgcggaccgcgccgcgagcctccgccagccgcccagtgtcgtccgccgccccaaagggcaccagtcctcacctgagacgctaggccgcacgccgcccccgccggccgtccgcccgctgccgccgccccctccccgagctgcctgcgcggcgccggggcccgcccgccgctctgccgagctcacaggccgcgctcgcccgcgggcaccgccggcagccgccgcagccgctgccgccgccactgcttcggctcctcggctgcgggagaccagaacaaacagcccagccgccgccgccgccgccgccgccgccgccagcgcactgacgtcaccgcgcacgctgcgcgcgcggccccgcgccgccgccgcccggtgtgcgcgccccgcccccgcgcccagcgcgaacgagctctggagagacagtggctgcgaggtgagtgggggataccgcggactgagggaggagaccccgcagagcgaaggagcgggctgggggaaacgggcggactgcaggctgggcctgcgggaaaagatctgaaggctgagagagacatccaaaatactaagaaaggtctgaagacagaccctcacagggagggaggatggtgaggagggaccccacagactgatggaggaggcggaggagagagccctaaggggggaccccaggtagggaggctgaggcgagagagctgcgatgggggcgccggggctggggtgaagtggaggaaaggaggtgagaggaggctgcgagcaaggccgaggcggatcctccttggctgcccctgggcagggaggtagcacctttctcctcttatgcccccctgttgatcttcttccaacccacctttttaaaaaaagggacatggtcttgctctgtcccccaggctggagtgcagtagtgcagtcatagctcactgcagcctcaacctgctggcctcaagcgatcctcctgcttcagcctcccaagtagctgggactacaggtgtgcaccaccacacccagctaactattttttgtagagatgggatctcacgatgttggccaggctggtctctgtctcctggactcaagcgatcctcctgcctcgacctcccaaagtgctagtattacaggcgtgagccaccgcgcccagctccttcccatccttaagactcaaccccaagtcagaccaggctcggtggctcacacctgtaatctcagcactttgggaggcagaggcaggaggttggcttgaggccaggggttggagaccatcctagccaacagagtgaaacctcgcctctactaaaaatacaaaaattagccccgtgtgggccgggcgcagtggctcacgcctgtaatcccagcactttgggaggcgggcagatcacgaggtaaggagatcgagaccatcctggctaagacggtgaaaccccgtctctactaaaaatacaaaaaattagccgggtgtggtggtgggcgcctgtagtcccagctactcgagagactgaggcaggagaatggcgtgaacccgggaggcggagcttgctgtgagcggagatcgcgcccctgcactccagcctgtgcgacagagcgagactccgtctcaaaaaaaaaaaaaaaaaattagccgggtgtggtggcgcatgcctgtaatcccatgcctgtaatgccagctactcaggaggctaaggcagaagaatcacttgaacccgggaggcgtaggttgcagtgagccgagattgtgccactgcactctagcctgggcgacagagcaaggctctgtctccaaaaaagaaaaagactcaaccctaagtcagctccaggacgtatgtgcctactctacatgtgtgagtccgaggggaaaaaacatcatatgacctcttctagggcttccaaagcaccccacctggccacggaagagcttagtaaacatggggtagttttgagattgctaaaaggaggaagttaggcatatgtctcttgtagcttaaaataatactgtgaaatttttcaaacctggaaacaaccacttctctttccttttatatatatatatatttttttttttaagacaagatcttgctctgtcacccaggctggagtgcagtggctggatcatagctcactgtaacctcaaactctcagtctcaagtgatcctcccacgtcagcctctttagtagctgggaccacaggtgtgcgccaccgtgcccagctaatttttgtatttttgtggagaggaggtctcaccatgttgcccagactggtcttgaattcctgggctcaagcgatccacctccctcagcctcccaaagtgctggaactacaggcgtgagccaccgcacccaggccattctcttagcattttgtattcccatcttttaaaaatggaaagcaggctgggcgcggtggctcacacctgtaatcccagcactttgggaggtcgaggcaggtggatcacctgaggtcaggagttctagaccagcctggccaacatggtgaaacttcgactctactaaaaatataaaaattagccaggtatggtagcgggtgcctgtaatcctagctactttggaggctgaggcaggagaatcacttgaacccaagaggcagaggtggcagtgagctgagatcgtgccactccactccagcctgggcgacagtgagactccatctcaaaaaaaaaaaaaaaaaaaaaaggaaagcaaactcagttctaaaaagtctacatggggccaggcacagtggctcacacctgtaatcctagcactttgggaggccaatgcgggtagattacctgaggtcaggagtttgagaccaacctgggcaacatggtgaaaccccgtctctactaaaaatacaaacaaaattagccgggtgtggtggcgggcacctgtagtcccagctactcaggaggccgaggcaggagaatcgcttgaacctgggaggtggaggttgcagtgagccaagatcatgccactgcactccagcctgggtgacagggcaaaactccgtctcaaaaaaaaaaacaaaaaagtctgcgtggtattttttttttaagtccaagtaatgaaacatttcctgatggcccatggtttcagaatatatggatataataggataccagtaaaatagttcttttctatcatgtgtttgctcatgcttaaccaggggcaatcataaatcactaatgggtcctaagcaaagttaaaaattaaattttttcattcattcatgtatctatgtattaatttattcatttatgacagggtcttgctctgttgcccaggctggagtgcagtgttgcattcatggttcaccaaaggctggagtgcagtgttgcattcatggttcaccgaagcctcgacctcctaggctcattcaatcctcccacctcagcctcccgagtagctgggactacaggcatgtgccactacacccagctaagtttttaaattgtagttggctgggcgcagtggctcacgcctgtaatgccagtactttgggaggctgaggcgggtggatcacctgaggtcggtagtttgagagcagcctggccaacatggtgaacacactagtctgtactacaaatacaaaaattaaaggccgggtgcagtggctcatgcctgtaatctcagcactttgggaggccgaggcaggtggatcacctgaggtccggaattcacaactagcctggccaaggtggtgaaacctcatctgtactaaaaatagaaaaaatttgcggggcttggtgacaggtgcctgtaatcccacctactcaggaggctgaggcagaagaatcacttgaacccaggaagcggaggttgcagtgagcagagattgcggaggtggaggatacagtagtgagcggagatcgcgccattgcactccagcctgggcaacaagagtcaaactctgtctcaaaaaaaaaaaaaaaaattagccaggcatagtgttgcatgcctgtaatctgagccacttgggaggctgaggcaggataatcacttgagcctgcttaagaggtggaggttgcagtgagccaaggtcgcaccactggactccagcctgggtgacagagcaagactctgtctcgaaaaaaaaaaaaatttgtagccataggatctcactgtcttggccaagctgatctcaaactcttggcctcaagtgattcttctgccttggcctaaccctttatttttaacaaagcatgagaaaacaagttattagctgcaagaaataaaggatgtaattgtaactccttcattgaaacttccttctaactctgtattacagaatattgaaatttgtgaatatcttctggctcctaattttgcacccctggcaattatgcagaagatgatcagaaatggaaaaagagcaggagggtacccagggctttgtgaataggtattaacaactggtttgttgttactgggttttttgtttgtttgtttttttaaggaaaccagaatgtatctattttaagctctccttccctatagttatcttgtcttgctgcattatccacttaatttatcattgttggccaggcgcggtggctcacgcctgtaatcccagaactttgggaggctgaggcgggcagatcacgaggtcaggagatcgagactatcctggctaacatggtgaaaccccatctctactaaaaatacaaaaattagccagacatggtggtgagtgcctgtagtcccagctactcgggaggttgaggcaggagaatgtcatgaacccgggaggtggaggttgcagtgagccgagatcgtgccactgcactccagcctgggtggacagagcgaggctccatctcgaaaaaaaaaaattatcattgttgttgacaataaatgtttttggaagtaatttggaactgttggtttgcaaatcacataataaaagccctcactttactgtagagtcacacttaacattagacaaaactatatatctagattgataactagaccgaactaggtggcttttggccattgctacaaattaaatccaacctggaaaaaatattcaggctgtaaaggcagttccaaaagctgtctccaaaaatcgtttgggacaacaatgtctcattctttttgtcttccatggtgctttgcctaactcctcgaagatagctcaaactcagaaaatgtttatctggttgagtcactttaataaaaatagtcttgttacctcatggttcacatgttatttatttatttatgaaacagtctcactctgtcgcctgggctggagtgcaatggcatgatctcggctcactgcaacctccacctcctgggttcaagagattctcgtgcctcagcctcctgagtagctggaattactggcatgtgccaccacgtccggctaattgttttgtatttttagtagagacgaggtttcaccatgttggccaggctggtctcgaactcctggccttaagtgatctgcccacctcggcctcccaaagtgctgggattacaggcttgagccatggcacctggcttatttatttatttattaagttataaagacaagatctcaccctgtcacccatgctggagtgcagtggcataatcatagctcactgaagcctcacccttctccactcaagcaattctcccacctcagcctcctgagtacatatgactacacccatgccccaccacacttggcttttttttttatttattttttttgtttgtttgtgttttgtagcaataaggtttcactatattgctcaagctagaatgcagtggctattcatagacacaatcatgtctgactatagccttgaactcctgggcgcaagcaatcctcctacctcaacctcctgagtagctgggactatagctgcctgcccagcttagattttaattctatgcatcaatgtgtatcaatgtatagaaatagttatgttatttaaacaaaagggatcatcctatatctgttgctttttgctgttttcttttttttagacagagtcttgctctgtcacccaggctggagtgcagtggtgcgatctcggctcactgcaacctctgcctccagcttcaagcgattctcatgcccctgcctcccaagtatctgggactacagacatgcgccaccacagctatttaattttaatatttttactagagacacggtttcaccatgttggcccgactggtctcagaatcctggccctaaatgatccgcccacctccgcctcccaaagtgttgggattacaggcatgagctaccgtacccagccagcttttttaatttaatacatacagcccagaactcctagactcaagcgatcctcccagtccacctcagcataccaaatagctgggactacaggtgcatgccactgtgtctggctggaagtcatttcacgtgaatactctgagatctgccttattggagatgatgtcaggatcacatacagtatgttatctatctcagataacatggtggctcatgcctgtaatcccagcactttgggagactgaggcaggtggatcatttgaggtcaggaatttcgagaccagcctggccaacatggtgaaaccccgtccctactaaaaaaacacaaaaattagccaagtgtggcggtgcacacctgttgtcccagctacacgggaggctaaggcacaagaatcacttgaacccaggaggtggaggttgcagtgagctaagattgcgccactgcactccagcctgggagacagagcaagactccgtttaaaaaaaaaaacaaaaaaaacactaaactaaaaaacgaaggaaaaagaaaacatggagttgttcctttggccacatgcatgcaaatctgtaagaaaagtaatgttgtagacatcaagggaatgggtactgttcacaaaggaatgccccacaactgttatcatgcaaaactggaagagtctacagtattaccaagcatgctgttgggattcttctaaacggacaagttaagggcaaaattcttgccaagagaattcatgtacgtattgagcacattattcactctaagaggtcaggagttcaagaccagcctgaccaacatggtgaaaccttgtctctactaaagatataaaaattaggtgggcatgatggtaggcatatgtaatctcagctactcaggaggctgaggcaggagaatcacttgaacctgggaggcgaaggttgcagtgagccaagatcacgccactgtactccagcctgggcaacagaacgagataccgtctcaaaaaataaaaataaaaaataaaagatcaatagactgtttaaaaaaaaaaaaacaaggataaatttatatagcatgttcagctctgaaaacatcagaaaggttgggtgtggtggctcacacctgtaaaaccagcactttgggaggccgaggagggtggatcacttgaatccaggagtttaagaccagtctggccaacatggcgaaatgccacctctacagaaaatacaaaagaaattagctgggtatggtggtgcatgcctgtcatcccagctatttgggaagctgaggtgggaggatcatcggagcctgggaggtagaagttgcagtgagccacaattgagcctctgcactccagactgggcaatggagtgagaccttgtctcaaaaaaaaaaaaaaaaaaaagggaaaaagaggccgggctccgtggctcacacctgtaattgcagcactttgggaggccaaggtgggtggatcacctgaggtcagaagttcgagaccagtcttgccaacatggtgaaacccgatctctaataaaaatacaaaaattagccggtcgtggtggtgtgtgcctgtaatcccagctacttgggaggctgaagcaggagaatcgcttgaacccgggaggtggagtttgcagtgagcagagatcgcaccactgcactgcagcctgggagacagagcaagattccgtctcaaaaaaaaaaaaaaaaaaaaaaaaggagctggaggatttgtgtcttgtatcaatgcccactttccaatgggaacttgcccacaaagttacattctagaatttatagttagacctagagaaggcaagtgagtcacccaaggtcacacatttacacagagttgagaacctagatatcctgactctgtaaagattgcttgcatttttttcccctagcccaggggttgacaaactttttctggaaagagccaaatactcaacattttaggcttagagggccatacaatctctataacatggccaattttttaaaaatttttttgagacagagtcttgccgcgttgcccaggctggagtgcagtggtgtgatctcagctcactgcaacctctgcctcccaggttcaagtagttttcatgccgtggtctcccaggaagctggaattacaggcatgtgccaccatgcccagctaatttttgtatttttattagaaacagggtttcaccatgttgcccaggctgctcttgaactcctgacctcaggtgatctgcccgcctcaggttcccaaagtgctggggttacagatatgagccctacagcgcccggccttttttttttcttttagtcagggtctcattctctcacccaggctgcagttgcagtggtaccatcagggctcactgcagcctcaacctcctaggctcaagccatcctcttgcctcagccttccaagttgttgggactgtaggcacatgctaccatgctgggctgttttgtttttgtttttgtttttgtttttttgagatggagtttcactctgtcacctaggctggagtgcagtggcgtgtgtctcagcgcacttcaacctctgcctcccgggttcaaatgattctcctgcctcaggctctggagtagttgggactataggcgtgtgccaccacacccagctaatttttgtatttttagtagagacagggtttcactatgttggccaggctggtcttgaactcctgacctcgtgatctgcctgcctcggcctcccaaagtgctgggattacaggcaggagccactgtgcccagctgtttttttttttcattatttttagtagacatgggggtctcatttaagttgcccagtgtggtctcgaactcctgggctcaaatgatcctcttgccttggccttccaaagtgttgggattacaggtgtgagccactgagtccagctacactgttaatttttgtagctgtaccattgtggcacaaaaacagccatagataatatgtaaacatatggcatgactggcaataaaatgttacggatactaaaatgagagtttcgtatacatttcatgagtcacaaaatgtcattattttgacttttgtcaaccttttatttatttatttatttatttatttatttatttatttattttttagacggagtttcgctcttgttgcccaggctggagtgtggtggcgcgatctcggctcaccgcaacctctgcctcccgggttcaagcaattctcctacctcatcttcccaagtagctgggattacaggcatgcgctatcacacccggctaattttttatttttagtagagatggggtttctccatgttggccaggctggtcttgaactcctgagcacaggtgatcgcccacctcggcctcccaaagtgctgggattacaggcatgagccaccgcgcccggctgtcagccttttaaaaaatataaaaaccattcctcactggaaggctgttcaaaaacggtggctgagatttgtcttgtaggccatatagtttgctcgtcccagttctagactctcaagcctagagaagcagaaatttctttacatgcatcttttttatttgtttgtttaagacagggtctctcggctgggcacagtggctcacgcctgtaatcccagcactttggaggctgaggtgggcagatcacgaggtcaggagatcgagaccatcctggctaacacggtgaaaccccgtctctactaaaaatacaaaaaattagccgggcgtggtggcggatgcctgtagtcccagctacttgggaggctgaggcaggagaatggcatgaacccgggaggcagagcttgcagtgagccgagatagcaccactgcagtccggcctgggcaaaagagtgagactccgtctcaaaaaaaaaaaaaaaaaaagacagggtctctctgtcacccaggctggagtgcagtggcacgatcactgcagccttgacctcctggactcaagcaatcctcctgcctcagcctcctgtgtaactggaaccatacacaggtgcatgccaccacaatgggctaacttttgcattttttattgtgacggggttttaccatattgcccaggctggtcttgaactcctgggctcaagagatcctcccacctcaacttcccaaagtgctgagcttgcaggcatgagccactgtgcccagcctacaagtctcatttctgtaatgatacagaagctactctgctataatttttaaaaaattaatagactattttgttagcagttttaggtttacataaaaattgaggccaggtgcagtggctcacgcctgtaatcccagcactttgggaagctgagccaggtggatcacctgaggtcaggagtttgagaccaccctgggcaacatggcaaaaccctgtctctactaaaaatacaaaaaattagccgggcatggtggcgcgcacctgtaataccagctacttgggaggctaaggcaggagaattacttgaactcaggaggaggaggttgcggtgagccgagatcgcgccactgcactctagcctgggcaacagagcgagactcaatctcaaaaaaaaaaaaaaaattgaagctgggcgtggtggctcacacctgtaatcccagcactttgggaggctgaggcgggtggatcacctgaggtcaggaattcgagaccagcctgcccaacatgaaaccccgtctctactaaaaatacaaaaatattagtcaggtgcggtggcacacacctgtactcccagctattcaggaagctgaggcaggagaatcgcttgaacccaggaggcagaggttgcagtgagccaagatcgcgccattgcactccagcctgggcaacaagagcaaaactccatctcaaaaaaaaaaaaaaattgagtggaaagtacgattcccatatatgcccttactactaccctccaccccattttccccaatctcagcattaacattagtgtgctacatttgttacagctgatgagccagtatagatccaataccgatacattattaactaatacctgtactttacattagggttcattcactctgtgttgtatattctatgggttttgacaaatgtataaacacatgtaggccggacatggtggctcatgcctgtaatcctaacactttaggaggccgaggacgggggatcactagagcccaggaggtcgagaccgtcatgggcaacatggtgaaacctcatctctgcaaaaatacagaaaattagccagctatggtgtcacatccctgtagtcccagctacttgggaggctgaggtgggaggatcacctgagcctgagaggtccaggctgcagtgagccaagatcacaccgctgtattccagcctgggcaatagagtgagaccctgtctcaaaaagtgaaaataaagacatgtatatactattatgcttgccagtttgtttatttgttttgctttgagacagggtcttgcgctgttgcccaggctggactgcagtggcatggtcgcagcacactgcagcctcaacctgctgggctcaagcgatcctcctgcctcagcctctcaagtagctgggattataggtgtgtgccatcatgcctggcaatttttttcttttttttagtagagatgaggtctccctatgttgcctagtctggtctcaaactcctggactcaagtgatcctcaccaaagcctcccaaagtgcaaagattataggcgtgagccaccatgcgtccggcttgcttgccgttgtttttgtttgtttgttttgttttgttttgtttttgagacggagtttcactcttgttgcccaggctggagtgcaatgccgtgatcttggctcaccacaacctccgcctcccgggttcaagcgattctcctgcctcagcctccggagtagctgggattaccaagtagctgggattacaggcatgcgctaccatgccagggtaagttttatatttttagtagaactgggatttcaccatgttgaccaggctggtctcaaattcctgacctcaagtgatccacccacctcagcctcccagggtgctgggattacaggcgtgaaccactgcacccagcctgcattttttttacaaacagattttcgccatgttgcctacactagtctcaaacccctgggctcatgtgatcctcctacctcggcctcccaaagtgctggaattaaaggtgtaagccaccgtgcccatccagttgacaaagtttatttctttttttttcttttgagagagagtttcactgttgttgcccaggctggagtgcagtggcgtgaacttggctcactgcaacctctgccccccaggttcaagccattctcctgcctcagcttcctgaatagctgggattacaggcatgtgccacaacacctggctaattttgtgtttttagtagagacggggtttctccatgttggtcaggctggtctcgaactcccagactcaggtaatcctcccgcctcagcctcccaaagtgctgggattacaggcatgagccactgcgcctggccgacaaagtgtatttcaaacactgcggagaattgttgtggtcttaattcatttggggtaatcggtattgtcattctcattgtcctcttgtgaggaggaattaggaacttatgtctctctagggaggctacagttttccttttggggaccattgtagtagagaattctcacattcacacatttcatttccctaaagttagtcaccggcccatgtgggtaatctctaaagaggacaacaagtatttagcagttatttcagagataattttctgccagcaaatatgggaaacttgcatgcatttttgaactctgcctcttcacatctatttagagaaatgttcccaagtctttgtaggcatctgagaagccaaaatccccaggcatttcccacagggcaggatcggttgtcgttttgagtgggtagcgatgggctgggtggcctattaagtgaaaacatggtgatctgtgcacccacaatgcctaggccctgcagacacaaatgcccaacttgttgacctgtgactcagacttagacccgaaaaggagatgttatatacactctgttctttattgaaataatccagcttgaatgagttggctggaaatataggatttgtaggaataaacggtcttccacatcaacataatggaattcagttgagaggaatattactggggatgtaaatatgctttaaacacaggctcgcggtggctcacacctgaaattccagcacttccggaagctgaggcaggcgatcacttgaggtcgggagttggagaccagcctggccaacatggcgaaaccacatctctactaaaagtacaaaaaaattagctggctatggtggtatgtgcctgcaatcctagctactcgggaggatgaggcaggagaatcgcttgaacccaggaggcggaggttgcagtgagccgagatcgtgccattacactccagcctgggagacagagcagcactccgtctcaaaaaaaaaaaaaaaaaaaaagaaaagaaaagaaaaaaaaaagaggctgggtgccatggctcacacctgtaatcccatcaccttgggagaagtttctcttaagcccaggagtttgagaccagcctgggcaacatggagaaaccctgtctctacaaaatatacaaaaattagcagggcgtggtggtgcatgcctgtagtcccagctactcaggaggctgagatgggaggatcacttaagcctaggagattgaggctgcagtgggctatggttgtgccactgcactccagtctgggcaacagagcaagaccctgtctcaaaaaaataaaaaaaagaaaagaataaaagtgttacaacaatgccagcactgtactggaagacagtaatcaaagaagtaaaactgtatctattcacagatgatgtgattttatagatacgaaatcctgaagaacacacacacacacacacacatacacacacaaacttattagagctaatacattccacaaaattagcatccatgatcaacacacaaaaacctcttacttgtatttctgtacactggcaacgaacaacccaaaaatgaaattaaaaacattctcggccagatgcagtggcttacgcctataatcccagcattttgggaggctgaggcgagcagattgcctgaggtcaggagttcgagaccatcctggccaacatggtgaacctctgtctctactgaaaataaaaaaattagccaggcgtggtggcaggtgcctgtaatcccagctactcagcaggctgagacaggagaatcacttgtacccgggaagcggaggttgcagtgagccgagattgtgccattgcactgcagcctgggcgacaagagtgagactttgtctcaacaacaacaacaaaaaaattatcaggcagaccccctgagtacaaacaaaaaattttttttttgagacggagtctcactctgtcgcccaggctgtagtgcagtggcgcgatctcggctcactgcaagctctgcctcccgggttcacgccattctcctgcctcagcctctcaagtagctgggactacaggcacccgccaccacgcccggctaatttttttgtatttttagtagagacggggtttcaccgtgttagccaggatggtctatgatctcctgacctcgtgatccgcccgcctcagcctcccaaagtgctgggattacaggcgtgagccaccgcacccggcccaaaatttttaattaaaaatgttttaaataggctgggttcagtggctttcacctgtaatcccagcactttgggaagccgaggcgggctgatcacttggtatcaggagtttaagaccagcctggccaacatggtgaaaccctgtcactactaaaaatacaaaaattagctgggtgtggtggcatgcaccagtaatcccagctactcagacgttgaggcaggagaatcgcttgaacccgggaggctgaggttacagtgagccaagatcacaccattgcactccagcctgggcaacagaatgaggctgcgtctcaaaaaaaaaaaaaaatttatggtagctcacacctgtaatcctaccactttgggaggccggggtgggtggatcacgaggtcaagagttcaagaccagcctggccaacatggtgaaaccccgtctctactaaaaatacaaaagttagctgggcatggtggtgtgcgcctgtaatctcagctactcgggaggctaaggcgaagaattgcttaactgggacccaggaggcagaggttgcagtgaaccaagattatgctggcactgcactccaacctgggctgcagagcaagactctgtctcaaaaaaaaaatttttttagtccgggcacggtggctcacccccgaaatcccagcactttgggaggctgagggcagatcatgaggtgaagagatcgagaccatctggccaacatggtgaaaccctgtctctattaaaaatagaaaaatttgctgggcgtgcgcctgtagtcccagctactttggaggctgaggcaggagtatcgtttgaacccgggaggcggaggttgcagtgagcccagattgcaccattgcactccagcctggcgacagggcaagattctgtctcaaaaaaaaaacaaacgaaagaaatgttaaaacttcattttacaatagcatcaaacatataaaaaatacttaggaacaaaagaggtccaagcctgggcacggtggctcacgcctgtaattccaggactttgggaggctgaagcgggtggatcacagggtcaagagatcgagaccatccttgccaacatggcgaaaccccatctctactaaaaatacaaaaatcagctgggtgggtacagtggcacacgcctgtagtcccagctactcaggagacggaggcaggagaatggcttgaacctgggaggccaaggttgcagcgagctgagatcgcaccactgcactccagcctggtgacagcgcgactccgtctcaaaaaaaaaaaaaaaaaaaggcaatattacctcagttgatctgtagatttcctgtctgatatctctgtcagagtaccagctgggtttgacaagatgaccctaaagtccatataaaaactcaagggctggggccaggtgcagtggctcacgcctgtaatccaagcactttgggaggccgaggtgggcggatcacctgaggtcaggagttcaaaacctgcctgaccaatatggcaaaacgccatctctactaaaaataacaaaaattagctggttgtggtagcacgtgcctgtaatcccagctactctgggggttgaggcaggggaatcgcttgaacgtgggaggtggaggttgcagtgagctgagatcgcgccactgcactccgcattgttgacagagcgagactctgtctcaaaaaaaaaaaaaaaaaaggcctggtgcggtggctcacacctgtaatccaagcactttgggaggccaaggcgggtggaccacgaggccaggagatcgagaccatcctcactaacacagtgaaaccccgtctctactaaaaatacaaaaaattagtggggtgtggtggcaggcacctgtagtcccagctattcgggagactgaggaaggagaatggcgtgaacctgggaggcggagcttgcagtgagccgagatcacgtcactgcactccagcttgggcaacagagagagactccgtctcaaaaaaaacaaaaaacaaaaaacagggacacagaataaccaaaacaatcttgaaaaagaggaacaaagtcggaggagtcacagttccttatttattttatttattcatgtttttattgttattgagatggagtctcactctgtcgcccaggctggagtgcagtggtgcaagctcagctcagtacaacctccgcctcccaggttcaagtgattgttctgcctcagcctcccaagtagccgggattatatgcatgcgccaccacacctggctaatttttatatttttagtagagatagggtttcgccatgttgggtgttggccaggctgatctcaaactcctgacctcaggggatccacctgccttgacctctcaaagtgttgggattacaggcgtgagccactgcacctgagcttgtatttattcatctattttatttatttatttatttgagatggagtctggctctgtcacccaggctaaagtgcagtggcacgatctcagctcactggaacctctgcctcccagttcaagcaattctctgcctcagcctcccaaataactgggattacaggtgcctaccaccatgcccagctaatttttttgtatttttagtagagacggggtgtcaccatcttggccaggcaggtcttgaactcctgatctcatgatccacccgccttggcctcccaaagtgctgggattacaggcgtgagccaccatgcccagcctatttatttttcttgaacacagtctctgtcactcaggctagagtgcagtggcatgatctcagttcactgcaacctctacctcccaggctcaggtgatactctcacctcagtgtctccactaactggaacttcaggtgcccaccaccatgcccagctaattttttgtatttttggtagagaagaggtttcaccatgttgcccatgctggtccccaactcctgagctcaggtgatccacctgcctcggcctcgcaaagtgctgggattactggcatgagccactgtgcctggccgactttgagttatttattattttaatttaatttttgaggcagagtgtcgtcactttgttgcccaggctgggtggattacaggtggcacggtatcagctcactgcaccctccacctcctaggctcaaacgatcctcccacctcagcctcccaagtagctgggattacaggtgcatgtcaccatgtccagctaattttttttgttgttgttgttgagacagagtttcactcttgttgcccaggctggagtgcaatggcatgatctcggctcactgcaacctctgcctccctcctgggtccaagcgattctcctgcttcagcctctagagtagctgcgattacaggtgcgcaccacatgcccagctaattttttgtatttttagtagagacagggtttcaccatgttggccaggctggtctcgaactcctgacctcaggtgatccacccatctcgccctcccaaagtaaatgggattacaggcgtgagctaccgctcctggcctgtccaggtgatttttatatttttagtagagatgaagtttcaccatgttggccaggctggtctctaactcctggccttacctgatctgcctgcctcagcctcccaaagtgttgggattatgggcatgaaccgctgcctgactttaaatcttacttcaaagcacagtgacataaggatagatacgtagaatagaatagagctgacagtccagaagtaaaccatgtagttatatggtcaactaacttttgacaagggtatcaagaccattcattgggggaaagaacagtctcttcaacaaatactgttgagacaacgcgataagccacatggagtgaagttggacccttaccttacacgtatataaaaattaacttggccagaggcagtggctcacgcctataatcccagcactttggaaggccgaggcaggaggatcacttgacatcaggagttcgagaccaacttggccaacatgatgaaaccctgtctctactaaaaatacaaaaagtagccaggcgtggtggcacaattttgtaatcccagctactcgggaggctaaggcgtgagaatcacttgaactgaggaggcagaggctgcagtgagctgagactgcgccactgcactccagcctggacaagagaatgagattccatctcaaaaaaaaaaaaaaaaaaaaaaaattggccgggcgcggtggctcacgcttgtaatcccagcactttggggaggccgaggcaggcggatcacgaggtcaggagatcaagaccatcctggctaacaaggcgaaactccgtctctactaaaaaatacaaaaaaattagctgggcgtggtggcgggcgccagtagtcccagctactcgggaggctgaggcaggagaatggtgtgaacccgggaggctgagcttgcagtgagctgagatcgcgccactgcactccagcctgggcgacagagccagactccgtctcaaaacaaaacaaaacaaaacaaacaaaaattaaaatgaactacagacctaaatatgagctaacattattaaattattggaataaaacatagaagtaattttttttttttgagatggagtctcactcttgttgcccaggatggagtgcaatggcatgacctcggctcactgcaacctccgcctcctgggttcaagaaattctcctgcctcagccttctgagtagctgggattacaggcacctgccaccacacctggctaattttttgtatttttagtagagacggggtttcaccatgttggctaggctggtctctaactcctgacatcaggtgatccacccgcctcagcctcccaaagtgctgggattacaggcatgagccacaacgcccggcttacaagacttttttttccagatggaatctcgctctgttggctcaggctggagtgcagtggcgtgatctcagctcacttcaacctccacctcccaggttcaagcgattctcctgcctcagcttcccgagtagctgggattacaggcatctgccaccatgcctagctaatttttatatttttagtagagacggggtttcaccatgctggccaggctggtcttgaactcctgacctcagaccatccacctgccttggcctcccaaagtgctgggactacaggcatgagccaccatgcctggctacaaggcttttaaaaattagctgggcatagtggtgcactcctgtagtcccagctaatcaagaggctgaagtgggaggatcacttgaaaccaggatttggaggccgcagtgagctgctgtggtgccaccgcactccagcctgggcaacagtgagatcctgcctgtaaaaccaacaacaacaacaacagaattatgtagtttcaccaagaggtggaaggtggaagagcctcactgacattcagaccaatttaatgacaggtcttggattgacatatacatattttgaaacgaaattttgctcgtcgctcaggctggagtgcagtgatgcagtatcagctcactgcaacctctgcctccagagttcaagtgattttcctgcctcagcctccagagtagctgggactacaggcacctgccaccacgcctggctaattgtgtatttttagtagagatggggtttcaccacgttggccaagatgctctcgatctcctgaccttgtgatctgcccgccttggcctcccaaagtcctgggattacaggcatgagccaccacacctggcctgatattttatttttttgagacaaattcttgctctgttgcccaggctggagtgcagtagcgcaacctcgactcactgcagcctctgcctccctggttcaagcgattcttctgcctcagcttccccagcagctgggattacaggtgtgtgccaccacacccagctaatttttgtatttttggtatagacagggttttgccatgttggccaggctggtcttgaactcccgacctctactgatccacctgcgttggtctcctaaagtgccaggaatacaggtgtgagccaccatgcctggccgggtcttggatttttataagaagaaaaaaaaggtgtggggtaggggagagccaggtgcagtagctcatgcctgtaatcctgggaggcagaggttgcagtaagccaagatcacgccactgcactccagcctgggcaacagagtaagactgtctcaaaaaaaaaaaaaaaaagaaaaaaaaaagaaaattaaggaaataaagcagttccactagtgatgtttttctgcactactgtttaatgctaccgacatttttgccttaagagaacaagcttaaaaggcatgctcaccctgcgattaagacgcatctacacaacacaaacggatgctgagcagaaatgacccagaggcaccatcgtcttttcaagcagtttatttccattttcagttctaatgttgactttttcataaatattcacctggaatctccactaaggctcctcatgagcagggcccaattcctagaatgtgcttggtgagttagcccctggtatacagtagaggctcggcaaatattctacagcctcctttctaatgatttcccagtggccagcgtttcccaacatgtgagatgtacagttcaaaaggccacagggaaactgacacagcagggccatttcaaaaggggaggatcttccaattcttctgattttaggaaattctgttgcgtgctaaccttgaacacatgctagcctccctttctcagatttggaaagatctaaagtaatagttatttctctaaaatgaaacatatatttcattttatatatatatatatatattacagataccttctatctatggcaatttatgttggattattccacctatggcaatcacatcaagttttctttcctttttttttaagagatggggtcttgctatgttgtccaggttggtcttgaactcctgggcttaagctatcctctcaccacggcctcccgaagtgctgggattataggtatgcatcaccgtgcctggccaaattctctttgtaaatacatttgagtggtagtaactaattttaaaggaaaaaaacctgaagtaatctagaggtggaacacaaatgaggtaaaatattagagaactgattcagcaaggactaaagattgggacgcaatgccctctgcacagtctggttcttgaggttgcggtgggtgtgtttccagtggcgtaggtcggtcagatacttctggcctttgggagtgcgtggatgtgacgcggtcagtgccacatgtgaaccaggtgctgcgaagtcctgtgaaagtcacacaccatatggtgcactacaaaggtataggttaaaggctgaagcttgaaacatacaaaaaaaaatcctctatagagcaagatatattcctagtattcagctgttcccaaccaaataaaaaaaaaaattaaggaaaaaaataaaaaaggaagcattccatcagtggctgtattgaacaagtaatgtatcatcaagatataatcacccaacctttattattccaagtgcactactgtcaagagacatgttacagccgctaaggacaatgtacttcagctttgaaacctgggcaagaagccacacgactgcatgagacaagccgtgagaggcactgctcaggaggaaacgctgggtctcttcaccaaaattagattacagcatattctgggagcacacgcccttgtactgcttacaaaccaagggagaaagaccaacgcatccatcatcccaacgccttccctggaacagggaaatgagcatcattctgtgggaacagcgtctttagactctgcatcagtttgttccacttcagcatccgcggcagctggggcaggagcaactctggtttgggcactttctgcctctgctgccattgtctcggcgccatttccagcctctgcagcctcacttctggccttggggacgcccttctcatgtgccgttccacagggcacctgctcttccagcagctgttcggcttgaggatcactaccggcctccgctgtgtccgtggggccttcgtcctcagccggctccccgctgctctctggagcgggcgctccttccccatctacggccctcactgctgctgtaatcacctctgctaagacgtccgcggccacctcctcaggtgtctctttcttatcctcacctcctaaattgtcatctccttccatttctggatcaacagtttcactggtgaaagggtcctcaccctggccaaagaggaaacaccggtcagcgtggtgtaagcagagctcaggaggcccatgattgcggggatgtcagcttttcagaaccagcagtccacaagggaaacacttctgtaaattatgccacaggagtgaatcctacatgttctcagagcctacagattcagaaaacacctcggggagatattctgcaattttttttttttttgagatggagtctcgctgttgcccaggctggactgcagtggtgcgatctcggctcactgcaacctccgcctcctgtgtttttagtagagatggggtttccacccacctcagcctcccaaagcgctgcgattacaggtgtgaaccaccatgcccggcccattctgcaatttttttttttttgagacggagttttgctttgttgcccaggatggagtgcaatggcgcgatctcagctcaccacaacctctgcctcctggtttcaagtgattctcctgcctcagcctcctgagtagctgggattacaggcaggagccaccacgcccggctaattttgtatttttagtggagacggggtttcaccatgttgggcagactggtctggaactccagacctcaggtgatccgcctgccttggcctcccaaaatgctgggattacaggcacgagccaccgtgcctggcctgcaatttttaatcaagcatgtaccagcgaggaaaagttcacaagcccagccttaacttgatgttttttaaaaaagggcatgaggccgggcgtgatggctcacacctgtaatcccagcactttgggaggccaagatgggtggatcacgaggtcaggagatggacaccatcctggctaacacagtgaaaccccatctctactaaaaatacaaaaaaaaaaattagccgggcatggtggcgagcgcctgtagtcccagctactcgggaggctgaggcagcagaatggcgtgaacctgggaggcggagcttgcagtaagtcgagatcacgccactgaactccagcctggcagcctgggcgacagagtcagactccatctcaaaaaaataaaataaaataaaataaagggcatgtaataggaagttaacactacgtaatattttagtttcattaaggtacagtggctcacgcctgtaatcccagcactttgggaggctggggctggaggactgccggagctcaggagttcgagaccagcctgggcaacgtggcgaatcaagattcaaatccaagtctgactccctcagaagtcaaaattctcctaagtatatgatagaaaactatctgtagtctaaaacaagcaaactaaaagttatcattaccagattaggaaacatgttttaaaatatgatgcttagggcaaggtgctcacgcctgtaaccccagcaatttgggaggtcaaggcgggaggatcacttgaggccagaccagcatgggcaacagagcaagactgtcttaaaaaattagccagcatgtggccgggtgcagtggctcacgtctgtaattccaacactttgggaggcggaagcaggcagatcacaaggtcaggagatggagaccatcctggctaacacagtgaaaccccatctctcttttctttttttgagacggagtcttggtctgtcgccaaggctggagtgcaatggcgcgatcttggctcactgcaacctgcacctcccggattcaagcaattcactgcctcagcctcccaagtagctgggattacaggtgcccgccaccacgcctggctaattttttttttatttttagtagagatggggtttcaccatcttggccaggctggtcttgaactcctgacctcgtgatgcacccgcctcggcctcccaaagtgctgggattacaggcgtgagccaccacgcccggccaccccatccccctgcaaaacattagccaggcatggtggtgggcgcctgtagtcccaggtactcaggaggctgaggcaggagaacggcatgaacccaggacacagagcttgcagtgagccgggatcgcaccactgcactccagcctgggtgacagagcaagactccatctcaaaaaaaaaaaaaaaaaaaaaaaaaaaaaattagccaggtgtggtggtgtactattgcagtcccagctacctggcaggctgagtggggaggatctcttgagctcaggaattcgaggctgcagagaatctctgcaggaatctcttggctgggtaccaagagaacaagaccctgactcaaaaaaaaagacgcttagaagcctgagctcacacttgactctggaaacttttaccttgcttaagctgcaaaggtaaaatatacatcagtcatgtttcctccctctttttttttttttttttttttttgagacaaggtctcactctgccatccaggctggagtgcagtggcacgatcttggctcactgcaacctccgcctcctgagtagctgggaccacaggcgcatgccaccacgcctggctaatttatgtattttttgtacagacagggtttcaccatgttgtccgggctggtcttgaactcctgaactcaaagtgatccgcccaccccagcctcccaaagtactgggattacaggtgtgagccaccacgcccggcccagtcatgtttcttcaattggttatttagattctgtgcctttaatagatggaactgtcaaatatggaagtgtttagtaactgagaggagggcaaaggtcctgaagtcaggttgtgggctgggacttagccacctgccccaaatgctaaagtcctgggatgaacactgagcaaaatgggtttcacaaggaagaactgggagctcttccaaccagccttctctccatgagcacccactttgggacttcgatatgctgctcccatcatgaaggctctggttcttcactacccctcaccttcaacctcactgtcagttggctctatcaatgaaatctctttttagcttctctcctggaaaattctcatgtaccttggattctttttttttttttgaaatggggtctcactctgtcacctgggctggagtgtagtggcgcaatcgttaactcctctaactcctgagctcagggatcctcctgcctcagcctcccaaactattggcattacaggcatgagccataattcccggttccccgctttcctttattttcaagaccagtcttgctatgttacccaggctgaagtgcagtggtaacaccatcactcactgtagcctcaaattcctgggctcaagcaatcctcccatcccagcttcccgagtagggctagccttgggtttttcttaaaaaatcacctaaccatcatttgctcagaattttaaggctaaacaatcaggatttttcatggtaaaaatccattacgcactgattaatcaagcagcgccacatccccagagtccccaggcaagcactgactcattagaaatcccagttgtcatgttcctgagcttgatgcattccagtgtccctcaactgtcaaaagactcagaaatgctaaatgctgcactctggattcaactccctgctcctggggttcatcttcccttttgaaagcttttcctgtctgtggtacttgcaagcacaaaccttgaggtatttttccagcatcttcactatatgtctgttgttcaaaacactcttagccacatggagactggttttcttgaactgttcagcagccaactgcaaagggaaccaaatgtgagctcttaaaaatggcaaagattaaggaagagaataaaccagccaggctctgccgagtcatcctgagatcagccctatgcagagaagcgaatctcaaaacgccagcctccaagaatagaaggctccagagactgtgcaaccaagactaacaaactggaaaagctaggcaatcttaagagataaatgcaaagatgcaccactgatacccatgtagcacatgcagaattgggggtgaaacaagagcatttacaaatgaaaggctgtgtggactcagtggaggaaaaggacaagctctttcttttcagtttttggggttacattgatttcataagttcaacaacaaaagtatgaatatgctgggtgtggcagctcatgcctgtaatcctagcacgttgggaggctgaggcatgtggatcacttgaggccaggagttcgagacaagcctggccatcatggtgaaaccctgtctacaaaatataaaaattagctgggtgtggtggtgcacacccgtaatcccagctactcaggagactgaggcatgagaatttgggagatggaggttgcaatcagctgagattgtaccactgcattccagcctgggcaatggagtgagactctgtctcaaaaaataaaattaaaaacaaaaacaaaaacaaaaaacaaacacacaaccatgactgcaccaagtctctgttttagagcctgacttgtttgcacaatggtcccttgtttgtatactgcttttcagctgatctttaacagtactggggctgggtgcagtggctcacacctgtaatcccagcactctgggaggctgaggcgggtggatcacctgaggtcaggagttcaagaccagcctggccaacatggtgaaaccccgtctctattaaaaatacaaaaaattagccgggcattgtggtgggcgcctgtaatcccagctacttaggaggctgaggctggagaattgcttgaacctgggaggcagaagttgcagtgaactgagatcgtgccactgcactccagcctgggcaacaagagtgaaactccgtaaaaaaaaaacaaaaaaacaaaaacgtaaaccaaaaaaccaaaaccaaaaccaaaaccaaaacacagtactgtgagatgggtgagcagctcttgacctccccatttaatagctgagtaaactaaggagagagctgctaacccagggccagaaagtgacaggctgcagagcaaacgcagccacaggcactcttcactgtctgcttttctgcactgacagcaggtagagctgttgctggatagggcctctatggtctgcaatgctaaaaatactcatgatctgactctttacaaaataaggtatttttccagcatcttcaacacttgacccctgggctcaacatttagcctgaagccccagcagctaggtaaggacagaaccagtcctttagtccaagtcccctgggccactcagctttcaatggcccttcggtctcagcttatggaagcccccaggccttccgctagtgggaaaactgaccaacgtggaaacactatcaggagaatctcagctactgcatttaatcgagtctaagcaacacattttctcacatttttataaaaattgagacgaatcttacgacccatcgatggaagtgatagacttgaaacatagcaagaacccctaaagatgttgttattccccataagacacagcaggctctgagccgcagccctgcaatgagcaccccaggcagtgtggggaggaagactcaccctgcggttgtgattgtggtccacggagtgcaggtgccgctggaggagctgcggctgtgcaggaattagcatgtcgcaggccaggcagtgagcagcctcgatcttcttgaagaagtgctcctggccaatccctgccaggaaacgcatgtcttgtaggatctgggacagcaagtgatgctttcctcctactccccatctgggcccacgttttctccctgcaactctaaggaatcagaagggcacagcctgcctttctatggggagtatgggtcagcacatcggcctctatagctgtgaattctgcacttttcagcttttctgttcctcctggttgtttcttttcaaaccaaggaggaaaagatatgaaagtgcttaatgtcactgatataagctgcaatctatgcaaggccacatccgaaggtttctttccattgctgctgagcgctcttcccacgggtctcgtcatcaccttctcagccaacttgggctggcttcatgccactttttttttttttttttttgagacagagtcttgctctgtcgcctaggctggagtgcagtggtgcaatcttggctcactgcaagctctgactcccaggttgacaccattctcctgcctcagcctcccaagtagctgggactacaggtgcccgccaccacgcccggctaattttttgtatttttttagtagagacggggtttcaccgtgtcagacaggatggccttgatctcctgacctcatgatccgcctgcctcagcctcccaaagtgctgggattacaggtgtgagccaccgtgcccggcctcgtgccacgttttacgggtcctgtcacatgccttactaccatccaggaaagcactcatcctgggatgacaactcacctttgaaaggatctggttttggttttgcggtttctttctccatcaattcctgacgccgcttctcaattttcttatttctgtttacaatgtattcctaggtgggattggagagggcataaagtaaaatgagaggtgggcgcatgtgggcatttctcaactgccagggctaggcaggcagctatcagagcagctgcgtggggcagcacagcacgatggctggagctcccggttgtccctgtgactcagggacttacacagctactctatctgggaaaggaaaccttggccaagtatagcctctgatttcccttcctccttcaagggatccggcacctgcgggatgggcaagagacgcggtgacggggcccaggtttcctttacctggaggaactccacggtcttgtcgggcagcttggtgcttatgaaccgcagggtctctttgtgaaatttgctttgcagatgcttctggatctcttcgtcatcaaagctacggaacttgcatacagaacaggcaaactgaattctgtagaaggaaaacaaggaggggagtgaagcagggagcatcagcgagtgaagcagggggcatcagctcacctctgaggagagctgaaatagaaacaggattttcagctctccccctccccctctccctctccccacggtctccctctgatgccgagccgaagctggacggtactgctgccatctcggctcactgcaacctccctgcctgattctcctgcctcagcctgcctactgcctgcgattgcaggcgcgcgccgccacgcctgactggttttcgtatttttttggtggagacggggtttcgctgtgttggccgggctggtctccagctcctaaccgcgagtgatccgccagcctcggcctcccgaggtgccgggattgcagacggagtctcgttcactcagtgctcaatggtgcccaggctggagtgcagtggcgtgatctcggctcgctacaacctccacctcccagccgcctgccttggcctcccaaagtgccgagattgcagcctctgcccggccgccaccccgtctgggaagtgaggagcgtctccgcctggccgcccatcgtctgggatgtgaggagcccctctgcctggctgcccagtctggaaagtgaggagcgtctctgcccggccgccatcccatctaggaagtgaggagcgcctcttcccggccgccatcacatctgggaagtgaggagcgtctctgcccagccgcccattgtctgagatgtggggagcacctctgccctgccgccccgtccgggatgtgaggagcgtctctgcctggccgccctgtctgagaagtgaggagaccctctgcctggcaaccgccccgtctgagaagtgaggagcccctccgcccggcagccgccccgtctgagaagtaaggagcccctccgcccagcagccaccccgtctgggaagtgaggagcgtctccgcccggcagccaccttgtccgggagggaggtggggggatcagccccccgcccggccagccgccccgtctgggaggtgaggggcgcctctgcccagccgcccctactgggaagtgaggagaccctctgcccggccagccgctccgtccgggagggaggtgggggggggtcagccccccgcccggccagccgccccgtccgggaagtgaggggcgcctctgcccggccgcccctactgggaagtgaggagcccccctgcccggccagccgccccgtccgggagggaggtggggggggtcagccccccgcccggccagccgcaccgtccgggagggaggtgggggggtcagccccctcgcccagccagccgccccgtccaggaggtgaggggcgcctctgcccggccgcccctactgggaagtgaggagcccctctgcccagccaccaccctgtctgggaggtgtacccaacagctcattgagaacgggccatgatgacaatggcggttttgtggaatagaaaggcgggaaaggtggggaaaagattgagaaatcggatggttgctgtgtctgtgtagaaagaggtagacgtgggagacttttcattttgttctatactaagaaaaattcttctgccttgggatcctgttgatctgtgaccttacccccaaccctgtgctctctgaaacatgtgctgtgtccactcagggttaaatggattaagggcggtgcaagatgtgctttgttaaacagatgcttgaaggcagcatgccaagagtcgtcaccactccctaatctcaagtacccagggacacaaacactgccaaatctccctctgcgagaaacacccaagaatgatcaataaaaataaataaataaataaataaataaataaataaataaattggcagtgggcaaaaaaaaaaaaaaaaagaaacaggattttcagtaattttttttctttcctttttttttttttttttttggagatggagttttgctcttgttgccgaggctggagtgcaatggtgcgatctcagctaaccgcaacctctaacacccaggttcaagcgattctcctgcctcagcctcccgagtagctgggattacaggggcccgccaccaagcctggctaaatttttgtatttttattttattttatttatttatttttttgagacggagtctccctctgttgcccaggctggagtgcagtggtgcgatcttggctcactgcaacctccgcctcccaggttcaagtgattctcctgcgtcagcctcccgagtagctgggattacaggcgcccaccaccactcccagttaatttttgtattgtgagtagagacgtggtttcaccatggtggctaggttggtctcgaactcctgacctcgtgattgacccacctcagcctcccaaagtgctgggattaaaggcgtgagccaccgcgcccagcctattttttttttgtatttttagtagagacagggtttcaccatgttggctaggctggtctcgaactcctgacctcaggtgatccacctgccttagcctccccaaagtgctgggattacaggcgtgagccaccgcacccagacttttctttttctcgagatgagatttcactgtattgctcaggctgttctcaaactcctgggctcaagcgatcctcccacctcagcctcccaagtagctgggattagaggtgcatgccaccgcactcagccagggaaagtggctgctgaaccaagagttccgacttcccaaagggcaacagaatggcagttacccaaacttccccagctgaagaatgggaacacaggcttgcaggtatctcaggaaaatgactcgcatagtaatctgctggcactgcagcccctctggccccaaagcccctgagaaaacaccagaaagctgcaactgcttggaactggggacgccctaggctctggctggcagctcttggggcccagcatctagcttcacagcttctcagatgagttcctctctgcaggaactgggatgacataaggcaacctcattttacgtgcagacaaaacacctcgcacaattcaaaacacaaaacccagtatcagttctgccatgagactacacgtaaagacatgtcacatcaaattctacagataaaaagtgaggcttctttgtcacaggctttcaaagtctccccaaatgcaaccacgctgcatggcaagggagagcagcctgcaggcccccaggccaccacactggggtgctccctccctggctctctcctggaggctcctgccccttctggtgtaggggtgcaggccctgtggcactcaggacttcacctctgccaactccacatgcctggcttctgacctctgacaagcaacatgaagacacctccgcttctgcagacagcccctacgtaggcggggaggggacaatctcccggggctcatacacagcactgtcaggaagctactgatgagctgtgtgcttccctgctacacctctgcctccccgtgagaattcctccaagtcccttcgagatcctcagtcatggccaggcgcggtggttcatgcctgtactcccagcactttgggagaccaaggtgcgtggatcacctgaggtcaggagtttgagaccagtctggccaacatggtgaaaccccgtcactactaaaagtacaaaaattagctgggtgtggtggcgggcgcctgtaattccagctacttgggaggcggaggtaggaggatcacttgagcccaggaggtggactgttgcagtgagctgagatcgtgccactgcactctaggatgggtgacacagcaagactccatctcaaaggataaaaaaaaaaaaaaagaaaaagatcctcagtcactagcgcacactctgaaggtttctttttttttttttaaaaaaagtcacctgttcattggaagaacatacaagatgaaaaaaaagcaaaaagaaaaaaaaaaaaagcaaaaagtagtaaaaaaaaaatgtcatctctatacccttctcccagtactctgggaggccaacgcaggaagatctcttgaggctagttcaacagcccaagcaacagagaaagacccctatctctttattagattatttaagtttaaaaataattaaaaagaaaatgtcatctcagtttccatgtgacatgaaaagtcatctactctatccatttatctgtttaaaataacaagggtttcaatgttcctgtaccacttaagaagaaacagttctgcgtttggttcctggcttcgttttgctaagcatttctctcttttttttttgaatccttgatttaaggttcacatggaacagtgattttctttttttttttttgttcctgagatggagtcttgctccgtcgcccacgctggagtgcagtagcacaatctcggctcactgagatggagtttttatttgagatagagtttcgctcttgttgcccaggctggaatgcagtggtgtgatcttggctcactgcaacctccacctcctgggttcaagcaattctcctgcctcagcctcccgagcagcggggaatacaggcatgcgccaccatgccggacgaattttgtatttttagtagagactgggtttctccatgttggtcaggctggtctcgaactcccaacctcaggtgatccgcctgccttggcctcccaaagtggtgggattacaggcgtgagccactgcccccagcccgtttctttttctttttgagacagagtcttgctctgtcgcccaggctggagtgcagtggtgcaaccttggctcactacaaagtccacctccccagtttaagtgattctcctgcctcagcctcccgagtagctgagattacaggcacctgccaccatgcctggctaatttttgtaattttagtagagatgggtttcaccatattgaccaggctggtcttgaactcccggcctcaagcgatccgccagctcagccttccaaagtgctggaattacatgtgtgagccacggcatctggccccttttactaagcatttctttgaacacgacaatcactgcccagactgggcgcagtggctcacgcttgtaataccagcactttgggaggccaaggcgggcagatcacaagatcaggagtttaagaccagccttgccaacacggtgaatcccgacctctactaaaaatacaaaaattagccaggcgtggtgtcaggcgcctgtaatcccagctactcgggaggctgaggcaggagaaccgcttgaacctaggaggcagaggttatagtgagccgagattatgctattgcactccagcctgggcgacagagcaagactccatctcagaaacaaacaaacaaaaagaaaatcactgtcccatgtgaaccttaaggtcaaggattccccagcatcacatgatcactggtgatttcagtttctagtcagaagccacttaactcctggcagggagaggcaggcacatggtgtgctcacaatgacatcctttgggctcaacatttttgcaatccttttctattgtgggacaaaatcttgatggtaggatcatctctctacctgtctcctagctgtgtcaaactccaggggtggtctggatttggataaggtgaacacaggacagtgtctgagatgccagacaccaggctagggggcagggatgcccctcaggcctgcaggagagtaacagagcccgctgctgagcagttatggaccacacagacccaccagcaaggctgggattccagaggaatagagacacaggagtcaaacaccaatcctctaaagcaagaacagaaacctaaccaccaaagcaacgtcccagccatcctagaagacaggtagctcgtgtgctgggagcacgagtgatggtcttttctgcactcccaattgtttactgttttgcctcccactggtttggccagaggagtcaggccaccaggcccccagcattgtggagcgaggacaggtgagctcggcagcgcctccaccgcacgagtccacctcctcctgtggggtcgtgtgcccgcgcctcacctgtcggctgcacggtcccgcgtcctgtctcttctcctttgcttttcccttctcttcttcacatcctcgtcctcgtcctccttctctcctgtaacagacaagtcccttcgagacgctctgagtggcctgcaaaggagctgagctccagggcctggtcggggggctgcagcttggccaccgcaccctgtgccctgccactgcctgcaccacgcggcagggtccaggatgccccaaggcactgtcagagactcctggtggacacgggcctggagtgagagcccggagtagtcaccaaactccccacatggcctgaggcggccaggatgggctagggacacagcctgcccaccccatgtgcaccacagccccctgctccctctgtcctccccattctgcttgtccaatctcatgccctgcgatggggtcttctcccaatatcacaggagaagccaattctccccggatgaagaggcggcagctgaaggcctcaggaagtgaagcagctgctccgccgccctctatcccacctctaggtggactgtgacgagcgtcctggcggccccgtctgaactagggcctcagcaggtctgacagtccttgctggcccgacctctatcttccactcacaaaaaccgtcaatctagggctttcccagggctgcgtgggaagcaatcctagaaaaaaatttgggaagagaccaattggtcctcccgtccgtcccccggggccagcagaggagctcctcggagagccacgcggccatcatcccagcatgaggccagggacggacgctgaaaaaaggttggagaagcatctgaactgtaacccctacccctgatgccagtcccgagactgtcccacgaagatggcgaccggcgtgcgctgctcagaagcctctcaaaagggcgtgtgggatttttggcaagaggtcactgcctgaaactatgactgctgtttaatagcaaagtcatcccgggtaggtagcaggacctgcgcgcaacagacatgtcacctttgctttagcattgtgccgctaagcgctcggggcgccccgtgctatggacaggactgctgcgggtcgcgggggggaggaccgcagagggctggcaaagcctgaacaggaggaacatctaagccaagggccttcagaatggatgggagcagggccactgaggagccagcctatgatccttggggtaaccagctacggaaagacccacaggacaggtaaagaaacgagtggcttcagggtgagctccaggccgcggcacctcaggccgctctgccatgagggatttaagcctgctctgctgttgctgcagaccctctggtctcctgcattggacatgaagagacctgctgaagggcgcccgcctctcaaagacccagtgggcctgggtgctcccgaccccgcaggtgtctgctgtcacacactcgcaggcacgaagcaatgtgcagtgcagctgccagtatccccaccacagaggcccacagcacagcccagggcaggcgactgaaggaactggacaaaaggaagccccagagaaaacacttcagggaaatgcactggccgaggagggcacagaagatgggctgggggcctcttctctcatgtttctccttccctacaaacttcgactgtggtggacacccaaggctgccccccatccccactgcagcccacatcgggtcaggcagacagacccgtttccagtaaatgctgccccagacactttgaagcaaagtgttggctgatcgccacggtcaaggcccatctggtggctgcagcccctcttcccccacagccacgggcccctccatccaggcccctggcttgctcagaagctgggcagtaagtgcggggcagctgggaagacacaggaaagctgcaagggacacggtgatgcctacctctttgcctcccagagtcgcagagttcatcctcctggaaaagagtatacacaaagtccggcagtgagctggtgtgtccagactctccacaaccagcccagtccctggccactgcctggtgggcagtctcacccaagacctaggttgctatgccaccaagaatgagccacagtgtgttaggaccagcctccggggctcaggacagggcctgtgtgtcctgttattactcctagttgccttcagagattctgtgacaatcaccttgctaaaaagccattcacccaccctctctcggttcctcctaagctgcagaactgcctgccccatgacaaagacccacccgtacaattctatgaatggagcctgttcaccaaccgtagggagatagagtctcacttgggggatgccagttctggcattcttcatagaaaatgggttccaccacgtttcccgagcttttgtttatatttacccaatgtcttttttttttttttttttttttttgagacggagtctcgccctgtctcccaggctggagtgcaatgatgcaatctcagctcactgcaacctctgcttcctgggttgaagcaaatcctctgcctcagcctcccgagtagctgggactataggcgcatgccgccacatccagctaatttttgtattttcagtagagacggggtttcaccatattggccaggatggtctcaatcttgtgacctcgtgatccacccgccttggcctcccaaagtgctgggattacaggtgtgagccaccgcgccaggcctatatttacccgatgtcttaataacaatcacgtatagataaaaacgattcaactgagaatctgaacagagctgactccttaggcagtgaacatacggctaaattaacaatcagcaggtttacagagattcctaatctcaagaccagcaaaatagggatcaagtgagactctgaaaacctgaaaagccaccatctcctgcctgttccctgcctgtgtgactctaaggacttggggaaggccctccttcccactctggacctccaggccctacacctccaacttggatcagaatctacactggggtggctgaggcacctccccaagagcttggggtggtcccggctatgaactggccccacgtgctgcctgcctgtgccttgttgtgaggatggaaggatgaggacaccagtcagcggcacccggcacggagctggcggcaaatgagcctccagcctgtgcttggaggcttcagcccacagtccctgcacttactggcctagagaccagggagaggaactgggagcttttttcagaaaaggaatgtttgttgtaagttgaaaactttttttttttttttgagacggagtctccctctgtcgcccaggctggggtgcagtgatgcaacgtcagctcactgcaacctccacctcccaggttcaagtgatcctcctccctcagcctcccaagtagctgctactacaggcaagtgccaccactcctggctaatttttgtatttttaatcgagacggggtttcaccatgttggccaggctggtctccaactctcgacctcaagtgatccacccacctgagcctccctaagtgctaggattacaggtgtgagccaccgtgccggctaaggtggaaaacttttagaaatctagctaaaagtcagggtcctgaatccactcagaggtagtcaaatctaccatggcagctgctcctgcccctttgtgaggaagggtgattaaagaaagaagaaatcccacactagaggcaaaagggctgcctggtggacttacacccttgaattcttcatctcctgagcggaagtcaccagctgcgtcatctgccagacacaaagaaaggaaaagtcagtccccggagaacggtcccatccggtttccgccctcccaagctcgccatccagggtgagtctgccctgaccacagtggggttgaaacatgccacctgcgagtgtccacgacacagatggggcaagcagagcccccagcaggcagccgacccatcctacatctgtctggcccacctggcccccaggacataccattttcggagaaatctccttcactgtcaacccgggccagtttggtgtctggctcctcgtaaagttggaactgcttccgtttcctgcccgtgccatctggtccgaagcggtcaaaccctctcctcttgggctacagacaacaagcacaccccatgagctacttacgagggccatgaagatgccccacagaaaagaacaaggaggttgtaggatcagacaacacaggcacaaaaggtcttttcaaaaagcaaagagacaacataatttgaaactaaaaagaaaatcatgctgagtgaaaagaagccaggaacaaaaggccacacgtttcgcgactccatttgtgcaaaatgtctagaacacacaaatccagagaccagtggtggttgtcgggggctggtgggggcggggaagagacaggggtgactaatgagaagaagtttctcttctggttgacataaatgctaagattagactgtgatggtggggatggttgcacaatcctgtaaattaactaaaagtcgaactgcgcacttaaaaacatttaagtgaatgttgagatggggaaattttacctcaataaagctgctaaaaagagaagcgaaggcggccggaaggaaccttgcgagggcttacccgatcccgatcccgcatccgaggctgcgagcggccacatccgtagggcatggtgctgtcatagccgcccgccccctgcatgcccatcacgccgtagtcgggagccatggactgggagaagagggacggaggtggccggctgggggagggccctcccaggccccgtccacccacgtagttcagctcgttccagggcgtggacaggggctcagaggacgcagcggggggcacgaaggggtcgctgcgcatgaaggtgccagggttgctccggtcctggaagcggccctggccccggccccgcatgaagccatcaagggagccccgctcccgggctgggtctcggcattcactgtactgccccccaaagctgccattgcggtcggaccccaggtcgaactcatagtcgtagctgtagctggggcggtaggggttgtgctccggcaggcagggcctggagtcataggactcgaacggctggaagcggaaggagctgcaacagaagcacagcccatcaggggcggtcaccccgatcacccactgccacactccctcagtataacctcgacgcccctacattcaaaacagcaaaccaaaccaccctgcatcccacctaagtgctgggatgaccaaaactgaccaacaccctccctggaacactgctgagcaggggacagagcccctggccacaggaatagcatgatgtagaaaaaaggagtctcggggagcttagccaacaaccacgcccaagccccgccatgaagaaaagcaaggaagtcctactgtaacatcactgaccccccacgagcccaactcgtcaatgccacacccaagagggaggcggggacaggccctccctcaagagtgggtgcccactcccatgcgcacaaaggtggggatgtgtggggtcccgggggagggcttgggtccataatcacctctcccggtcctgtatgccctccccaccgccgccgctcccgcccctgcctccttccttggacatcatgtccaaacgctggttgatcttggcaatgagggagtcggaattgtcggtgcatggctctgggccgtaagaggccatgtgcatggcaggggccccggccgccaggccgccatcattggccttggcggcctcccacgaggctgggccgtagctgtaggttgcgcctgtggtgacactggtgttctgggcgccatagtaattgtagttttcataacctgtcacagggggaggagccaagtcagacttcagcagccacgaggcctgtccatggtggacacaaccggggaggggcacccgctgccacggagaaggaaaacgggtgtgggacccagtgctgctggcatcacttcacactgcactgtgacctgccaagaggcagcaggaggtggccagagaaaggggcagcctcagtgccgagcggcgggttttccatgccagacgctaggacctgttccccattcaaagccgggtgactgagagcctgggaacagcagttccggctgctgacaggccccacaaaggaccgctgctcccaaagcacggtcgcagtcctccccatcatgctcccctgaggccgcccaccacagccctctgcagtccccccatatacacaacagcagccgtggctgactgcgtcctcaggaacagagccagaaagtccacgccagacctccctgacgggctgacccgcctggccttcagatcagaggcccacttgcccgcccacagaccccccccacagaagggcttaccttgccagctggccacaccagttccatatgcaccttaggggaaacagaaacacacaagagccctgtttgcagaacgaaggcactgacaccccagctgtcaccttgctccaccctccacagccccagggccagggcttccctccgcagcgctcagggagacacccttgggtgtttttagctcactcaactcctacagagcactaggctgagaggctgagcacaagcaagccctctatcccgggcaaggccaaccgtccgtcagggcaagggaagggacgccgcacgctccccaggaagctcgtccactgtgggctgctggccaagaggttggccaggccaggccccaggcagagacctcgtaaagggtcagttcccatcagaagccagagtgcaggcgctgccaactgcacagcgaagcattggtgcaaagtcacgtcctcaactcaagcgaaaaagaggacgttatgtgccacgagcgacttggaaggcctcctcctgaaacaccgggtggtggctcaaaagcagccccactccccatgttgcctgagtcagatctcaggctcagaaaacaaaggaagccctcgtgccctaaaacacgggctggcagaaaggagaaagcctcgccagcagagagcatgcactggttcgccacacaagcctagcatcatggccctgactctaaagcagggatctgcaaaaagtccagccacacccagcccacttcccgccttggcacagcccttaggattttcgaatttcggtgcccataaataagtaccagcacactgcccgtagccctgtgctctcaggctctgccctcagctaaggatgaattttacgtttttaaatggttggggtaaagtttctaaagtgtattcaatgacaaattttgacatgagatacatcacttacacactggatcaaaactcagagaactatacaaattaacaaaaactatgagctatagtgaataatatcacatcaacattgcctgattaattgtaacaaatgcatcacaccaatgcaagattttttttttgttttttttttttgagatggagtctcgctctgttgcatgggctgaagtgcagtggcgcgatctcggctcactgcaagctccacctcctgggttcacgccattctcctgtctcagcctccggagtagctgggactacaggcgcccgccaccgcgcccggctaattttttttgtatttttagtagagacggggtttcactgtgttagccaggatggtctcgatctcctgacctcgtgatctgcccgcctcggcctcccaaaatgctgggattacaggcgtgagccaccgtgcctggcctttttttttttgagacagggtcgtgctctgtcacccaggctggagtacagtggcataatcacagctcactgcagccttacctcctgggctcaagcaatcttcctatctcagccttctgagtggccgggactacaggcacgcactgccacgccccactaatttttcattagttggataaaaggatcacttgagctcgggtctcgaactcccaggctcaagtgagcctcttgcctcagcctcccaaagtgctgggattgcaggcgtgtgctgcctcgcccagctaatgaaagatcttactaatgaggccaggcgtggtggctcacgcctgtaatcccagcactttgattatgggattgattatgaggtcaggagttcgagaccagcttggccaacatggtaaaaccctgtctctactaaaaatacaaaaattagctgggcgcagtggtgggtgcctgtaatcccagctactcgggaggctgcggctgcagtaagccgagatcacaccactgcactccagcctgggcaacagagcaagactctgtatcaaaagaaaaaaaaatcatactaatgagatttttagtacactcactacaggtgtagtgtacactcagtacacctgagtggaggtgggtgggcgtatgaaactccactactcaatctaaagctgtactaaaaagtctggtaattatagagaaaaaacacctcggatataccctcagctatttactcagaataacaaaaatattttgccaaaatagagtattcactaacacgcaaaaattaggaacttcaaattgtattgtctgtaagtaactactggcattgtcccatccactctttcacacatttatgactgctttcctgctacagagactgtggagcccataaagccacaaagatattcactatctgatcttttacacaaagtttgctgacccctgggctactactctcccttgacccaagttcagctctgccatgctagggccttgagttaggggaagcccacgcctcacccgcaaagcagagcccacttaccctgggtgttggcaggtccagcactccacgccccgtagcctgcaagaagaccccgtgagttaaaattctatttgtcacaccagagaacgggtccttttgggggtactcctaaagggatctccttacagttcagtgccagccttagaagaaggaagactcccccccaccccaccaaaaaaaagccatcacacaactggctaatggcgtcatcgcattccacctggctgagatcaaagcagaaaaagaagggtgggaagtgggcttggaagtcagctccgccctgcagagggaccttggccaaggacctcacctctccaagatttcatccacaactgaggctaacacaagacaatccactcagcatgaggacacgttcccccacccaccacacagctaggaaaccagttcagagtgccatcacaagtacttcgtaactgaaaacaagcatgggaatttagtgacataaattgcatctttctaagctgcacttcctgccactttttgtttttttgaggcggggtcttgctctgttgcccaggttagagcgcagtgccgcgatctcggctcactgcaagctccgcctcctgggttcacgccattctcctgcctcagcctcccgagtagctgggactacaggcgcctgccaccacgcccgcctaattttttgtgtttttagtagagacggggtttcaccatgttagccaggatggtctcgatctcctgacctcgtgatccgccagcctcggcctcccaaagtgctgggattacaggcgtgagtcaccgcgccaggcccttcctgccacttttaaggcctccacggatcccctggacctttaagtcccagagccttcgcctggccctaaggcatcagacagcactcttcacccctccacaccccccgcccactatggcatctgtctggtccctccaggaaggagaatgggaactgtgttctctttatttctgtgtccctggggcccagcactgagctgcgcgcgggtggccaccatgcctgttaaatgacttcactttgatgaggcaggaacatatccatgtctccctcaccagaacaactcccccgcccccggctaagtgcctagtgcgtgccgatacaccgcaagcacccagcaaaccctgttgtccggaatgccattcagagacaagggagctaggctcatgggttacgagacttgacccagtcatactgctgagttttgccctctgctatgctacgccttcccctccgtcataccgcaaaaccttctaaattcgcatccgtgcagcagaaaggcagactgcagattccaacagcaagtaaccaacctcgagagactgcttctctgtgaagctctagtgtaagtggcacgcactattaaccttaaaacgctcccggaaacacaagaaatcagggaagcttaactatctccagtgtgtctgaaaggttttcggcaggtaggaagagggggtaaaaaaaacctctccaaactaagaatgaaaagaaggaatacaatacctgcagaaaagatctgatgggaaagaagggaaagaatggtgaaatctacccaggctgcggaagaccaggagagccaggctgagccttcgctaggacccggaagacaccaaagcacaccgcgcacgctgccgcctcaggaccgaaacctctctctgcaatttctggtgctgggatacttttgccctgccacttctcaagatcgacaacttctcgagctcctgcagccaggatcagaccactagcttctctacaaccagtcgagctccacccagcatgtcccaactatcccctgtgggcaaactttgctcccaaaaggctctgattccagaagcagggagcaggcagctcgagaagatcggccctactgcaggccaagcgctaaatcctagtggggaaaggacacgttccctcctgcacagcccctcggcccctccaggccaccacaacagactgcctaaaggagaactgccaatgtcaccagccccagggcacatcaggtttccagctttatacgaacactcagcatctgcccctcaccatcctgtcccaagccagcacgcgccgggtacagagctggagcccggcgaggctgactctcgcgccggcagcactcggccccaccgcgctgcaccggggactaaaggcccgaccccgcgcagcccgacggcttccgggacaggcgccctgggccacgtgagcccagcggagaccctacacggccccgcgggcctagggcaggtcgggagagaggcggcccccgcggtccgcccgcggccccagacccagctccccgggtccgacctcacaaccccacgctgtagctccgcccccctagcgccgccattttgtggcgtcttcggaagaggaagccgggagtgcaaaccccggggtcgctgggggccggaaggactccgccgaaggtgaggggcaaaaacggcccacactgtctaagacgcccccacgaagcccaccgcggcgtctgccccaaccccgagtcccgcccgcctcctcggggcctggcggccaatccgcacgcagagccccgggagcgacggcgccaaagcccaatgagcggcgcgcgcgcgccctggccgcctctccggagggcccagctggggcaaccacgctcgggacgaaggcccggccggcggcagtctgcgcagcggctgcgtcgcccgcacagagccttccctccccgctccgcacccagcagccaacacaaacctccgtagccctggtccatgtcttcgacgcggcccaccagcagccccgtttactaggcgaccacagcacgcatgcgttcagcgcacctccgccatcgactactggaagaccaggcgcacacgtcactacttccgcgcgcccccattggctggtcttcacgagggcccgccctcgccgtcccagctggcctttcgggctgctacgatccagctccgtggcctaatgggagttgtggtcccaccgcggtgcccgacggcccggcccgcgcgcatgcgcaccccgcccctctgcccaccccgccccgcccgcgcggcacagtaacagagaaacccggaggtgggatgggaaaactttattaggtttggtttccagcttcggccacgcgggctccgcccgccccgagctcgggtcacggggcgcccccgccgccctcctcgtcgtcctccacgtcgaggcccgggatgccgcggatctggcgttgcagcgcccctcccagcaagggcacggcgccctcctcctcctcctctgggggcggcggcggtggcggcgacacggccccgggggctggctctgggggcacgggaggctgcgccggcacgccctctgcgccctccgagatccctgccgcttcgccctgcgccccctcgtccagggcaccgccctcagcctcctcctgctccttctcctcctcggggctgtcggtgaaagggttctcgccctgtggggaggggcgcggacactgaagggagggagcacaggcggggactaagctggggacagggcaggcccggaccagtgcctcaccttcaggtagcgctccagcttcttgctgatgagcttgttgttgagaatactgcgggccaccatgagggaggacttcttggactgctccatcatgagctgcgggcagggcagaaggagctggagaggctgctctgagtgccctacaagttgctgccccgaccctgccagcttagagggaccccaccccgcccctgcacccacgcacttccagccccaccaacggagggccactccacaagcatggaaccacaacctatctgatctttgttcaaattccctctccttccacaccacacttactgtaggtaaataaaaatacagatctatatatctctaactttacggctgtattacagaaatctgatttgcttacaaaaaagctataagcagtgaacaattaagaaactaagagccaaaggtgggtgcaacctgtaacaaggtgccaactaggctaataggcaaggagcactttggggccaacggggaagatataaaaacaggaacagatatttaatgaaacgtcttttttaacccacagaattccaagaatgaagaattattcccagtcatgcaagggtgaagagagtcttctctgctggtgggaggatcaactgtttccgtattttttggaaagcagtttgacacaatgtatgaaaagtaaaaatctgtctcattaatcccttcccagaacgtatcctaaatttaagaactggaaacatgcgtgcacactgattgtagtggtgaaaaatgggaaaacacctaaacgttcctcagtgcagaagaggttaaataaatcgtacattcaaaagaacatcatgcagcccttcaaatcgggctcatctctgcactggcataagaaaggtgtataatatagtactgtctgcagagcatgccagagccattttgtctggaaggatttccatcaatatgctgggccatctcatggtgggagtacaggcaaatctcactttgatcattataaaaaccataaggtaaaagaaggatatttttggtggggtgggagagcccattgagtccttcccactccatttacatgtttcagaaagccttctcacttgctgtttctactctctccatcttcatttttttttttccttagcacgttttctctactactggaggaaaatattaacagacatcatacatgctcacaataaactaaagatacacaattaggatactactatagaccgttcccccagtgactctcacttgccaacagtttatcctcctggttctagatgcccagataaccacaccataaattctcccaagtgaggcacatttatgttgcttccagatcttctccacaataacccagcaacactagaataaacttgtacacttccatgctggtgcttttcattctaaccaggtttggtttcaaagtgatagtgcccaattaactgcagaacatttgcaagtcatgcttcttccacctgtgttaaaacaatgacctggtcctcctgcctgcccatcagcactggatgttgtcactgttgggtatttttgctgtggataaaagacagaagaatctgtgctgctgcctcccacggcatttccctgcccaccggcgagtgagtgctctggtaagcacactggaacacccgcccacagtttataattttctaactattttctgatcttggttttcatttttcacatttaaattttttttttttttttttaagacagtctcgctctgtcgcccaggctggagtgcaggggctctcagttcactgcaacctccgcctcccaggtttaggcaattctcatgcctcagcctcctgagtagctaggactacgggcacgcaccaccacacccagctacttttttgtatttttagtagatacagggttttcctatgttgcccagactggtcttgagctcctgagctcaggacctccacccatctcggcttcccaaagtgctgtgattacaggcgtgagccaccacgcccagccaaattttctagaatttgatacagattgagtatcccttattcaaagtgcttatgaccagaagtctttcagattttgatttgcattatacttaccagttgagcatccctactccaaaaacccaaaatctgaaatgcttcaatgagcatttactttgtcatgtctgtgctgaaaaagtcagattttactgggcacagtgtctcgtgcctgtagtctcagctactctcatgaggctgatgcaggaggattgctcaagttcaggagttcaaggctatagtgtgcaatgatttcacttgcgaccagccactgcactccatcctgcacaacatggcaagactcaattcttttttcttaaagaaaaaggttttggatttcggagcatttcggattttcagatgacggatgaactcaatctgtatatgttatgaggtagagggtccaaaattttcttttccagaaatgtacaaaacacaccatttatttccctaccaaattggcatataggtctaccatcccttatctataaactggaaatccaaaaggctctagaaaacaagtcttcccccaaaattcatttggtggctaaatgtgaactgacattacatttttcatttatatgtaagtcatgtgaagaattatttgtgactcaactacaaggcgctttccccagatcctgttggagaggttagtgctaataccatattgtctttctttttattttattttagagataggagtctcactctgttgcccaggctgcactgccattgtgtgatcacggctcactgcagcctcaaactcctgggctcaagtgatcttcccatgctagcctcttgagtagctgggactataggcactcaccaccatgcttggctaattttttattttttgtagagacgagatctcactatggtcaggaactcctgggctcaagcaatcccacctaagcctcccaaagtgctgggattgcaggtgtgagccactgcccccagccttgcatattggttttctgaagctgaaaaattaattctgaggcttctggccctaaggtttcagataaaatatctgtactaactttaacaaattactaagtctgaaatatactgagatcttttgctagactctctattctggttccactgtttcattactgtgctaattatcactttttttgttttttaattgcagcagctttgtagtaagttttagtatttctgaaatcaatctctcagctattgttagactgaattttacaatgtaaaactttaaaataatttcatttcattcagtcctactccccgactgatatttttgactagaaatgtgctgtctatattaatttggagagaactggtttttgttttgtttcactattaaattgcctatttaagaacacagaacattcctccattcattaaggtctatttctttttttttttttttttttttttgagatggagtcttgctctgttgctcaggctgaaatgcagtggcatgatctcagctcactgcaacctccacctccaaggttcaagcaattctctgcttcagcctcccaagtagctgagattataggcacccaccaccccacccggctaattttttgtatttttagtagagacagggtttcaccatcttggccaggctggtcttgaactcctgacctagtgattcacctgcctccgcctcccaaagtgctgggattataggcgtgagccaccgtgcccggctaaggtcttatttcatatccttggagtatttgcagttcttaaaagatctcaagcctttcttcttccctccctgttttttttttttttgagacggagttttgctcttgttgcccaggctggagtgcaatggcgcgatcttggctcactgcaacctccgcctcccaggttcaagcgattctcctgcctcagccccctgagtagctgagattacaggcgcccaccaccacgcccagctaattttttgtattttagtagagacagggtttcattatgttggccaggctggtctcaaactcctgacctcaggcaatccacccgcctcagcctccccaaagtgctgggattacaggcatgagccaccatgcctggccctcaagtctttcttcttaaatctgtattcttagctatttcatacattgtgtggttattttaagtagttttttttccatttaaatttctaactggttaatactagaatagagaaacactacgactttttgtacgctattttgaatcccatccccttaccaaattctattaattctaagaacattttgctgggatcattcagcttttctaagagcataatcacattatttgcacataaagagagtttgcattataccaataatattgctagattttttgtttttgtttttgagacggagtctcgctttgtcgcccaggctggagtgcagtggcgcgatatcagctcactgcgagctccgcctcccaggttcatgccattctctttttttttttttttgagacggagtctcgctctgttgcccaggctggagtgcagtggcgggatctcggctcactgcaagctccgcctcccgagttcacgccattctcctgcctcagcctcccaagtagctgggactacaggcgcccaccaccacgcccggctaattttttgtgtttttagtagagacggggtttcaccgttttagccgggatggtctcgatctcctgacctcgtgatccgcccgcctcggcctcccaaagtgctgggactacaggcgtgagccaccgcgcccggcctttcatgccattctcttgcctcagcctcccgagtagctgggactacaggcgcccgccaccacgtctggctaattttttgtatttttagtagagatggggtttcaccgtgttagccaggatggtctcgatctcctgacctcgtgatccacccacctcggcctcccaaagtgctgggattacaggcatgagccaccgcgcccggcaactgttgctagatttcttagggaaccatccctccattccagaaacaaaccttacttataatgtatcatacatagggatcactactagattgatagttactaatattttatttagcacttcattttatttatttttttgagacagagtcttgctctgttgccccggctggaatgcagtggcacgatcacagctcattgcagcctcaacctcctgggctcaggtgatcctcccacctcagcctcccaagtagctgggaccacaggccccagtacctggctaatttttttatttttaattttatagacacagtgtctcactatattgcccaggctggtcttgaactcctgggctcaaatgatcctcccacctcagtctccccaagtgctgggattacaggtataagccactatatccagccaactttctttcttttttttctttttttttttttgaggagtctcactctgttgcccaggctggagtgcagtggcgcgatctcggctcactgcaacctccgcctcctgggttcacaccattctcctgcctcagcctctcgagtagctgggactacaggcgcccgtcactacgcccggctaattttttgtatttttagtagagatggggtttcaccgtgttagccaggatggtcttgatctcctgacctcgtgatccgcctgcctcggcctcccaaagtgctgggattacaggcatgagccaccgcgcccggccaatccagcccactttcatatctttaataatagtaaactaatctacagtttcattttggtatcatctttatcagaattttggaattaaggtttaagaagcttcctaaatattgagaggacagactctagcatagcagtctgaggcgttccctggaacactccctagtgaaactgatgaaaagtattaaaaaacaaccatttaaagtctctgaaaatgttcctaaggacatacagccctatgagaaagatttaatgaggaaaagctactaaaactcagttccatgaagagttgtgatgtctgaaacacaacctattgcatccctgcctcccccagcttagtgtgatggaaactccactccagacagtacagccaagaagacaggtctgcccgcatctacccagatcatctcagttaaggggtatgatatcttcccaggaggaacagaatgtcagcatctatttttctgagttggagtttcactcttggttgcccaggctggagtgcaatggcgtgatatcggctcactgcaacctctacttcccgggttcaaacaattctcctgcctcagccttccgagtagctgggattacaagtgcccgccaccaagcccggctaatttttgtatttttagtaaagatggggtttcacgatgttgtccaggctggtcttgaactcctgacctcaggtgatctgcccaccttggcctcccaaagtgctgggattacaggcgtgagccactgtacccagccggatgtcagtatctctcatcccgcccccagctacctgctgatgaggctaagttctagacaagcatagctgagagagaacggttcctatcttctacccagccacacgcacgtggaatggaggcttgaccctgggcatggcacactaagaatataagggctcacatacccatggcttgttcataaagcagaggtcccatgccaggaaaggcaaaccaagaccggaggctacagcctactgtacctcctcccatgtctctcctaaagtggcagagtcactcagagagaggtactccattgtctccatccccagagccttggctcagagattctgcccacagtgagagcacggccttaaatcagtaaactcccaatctcaaaggaactgactgacttcactggcaagagtgttgggaagtgcaagactagggcctctctcaaaaacaatggagactagggaggaaaaaaattaaaaggacattgatagcttttttttttctttctgaatatttattggagttaaacactgatagctttgtccttttttttttcccccaccacacagccataaaaaagaaggaccggtagatttgacagtgatattagctaacccataggctaactaggttaccaaagaggacaaggaccagtgaaatagctaagaacagactccctgggttcagaataaatctcaaacaaccacctcaaaaaccatccctcttgggcctggcatagtggctgacgcctgtaatcccagcaccttgtgaggctgaggtgggtggctcataagatcaagagttcgagaccagcctggccaacatggtgaaaccccgtctctactaacaatacaaaaattagccgggcgtggtagcacatgcctgtaatcccagctactcgggaggctgaggcaggagaattgcttgaacctgagaggtggaggttgcagcaagccaagatcgcgccactgcattccagcctgggcaacagagcaagactcttgtctgggagagggggcggggaggggaggggaaaaaaatccctataaaggagcccaaatttaattggatcagattgggcagcaatctatgccccaaaacattgttgaaaacaataaagcaatcagccagcaattggtagagtttaacagctgagtatggtctgggaaaaagagcgagcccatggcttcctccctccaagacacaccaccagtttcatactgtgtgagaatgaaagagacctaactaaaaaaatctagcaagtcactaaacaaatagacaagcaaatacagtaacaagaccctgggagggtgggtgggggatcagtgcccagagttgccacaacaaattatctaagatgtctagttaacagtgaaaaattatgagacatccaaaggaaactctgacccaggcacagatgaaaaagcagacaatagaaacttcctgtgacagtgaacagatgtcaaattcaacaaacattttaaagtagcaattgtaaataggtttaaagaaaactcaagtagaagaaggtataatgacactgtctcatgaaacaatttaaacacagagatagaaatgataataataaaatggtaaatcttagagctgaaaagtacaataacggacaccaaaaatccatttgaaggactcaacagatttgaacttaagaattagtgaacttgggccgggtgcggtggctcacgcctgtaatcccagcactttgggaggccgaggcgggcagatcatgaggtcaggagatcgagaccatcctggctaacatggtgaaaccccgtctctactaaaaatacaaaaaaattagccgggcgtggtggcgggcgcctgtagtcccagctactccggaggctgaggcaggagaatggcatgaacctgggaggcggagcttgcagtgagccgagatcgcgccactgcactccagcctgggcgacagagctagactccatctctaaaaaagagtgaacttggccgagctcggtggctcacgcctataatcccagcacttagggaggccgaggcaggcggatcacaaggtcaagagatggagaccatcttggctaacacggtgaaaccccatctctactaaaaaaaaaaaaaaatacaaaaaattagccgggcgtggtggtgggcgcctatagtccccagctacttgggaggctgaggcaggagaatggcatgaacccaggaggcggagcttgcagtgtgcagagatggcgccactgcactccagcctaggcaacagagcgagactccatcacaaaaaaaaaagaaaaaaaaaaaaaaagaattagtgaacttgtgtatcaaaagagattatacaatctgcagaacagagggaaaaaaatgaggtaaaatgaacagtctcagacaaccatggcacactattaagtgatccaacatacgggtaatgagcattagaagaggaaagagagaaaggagtaggaaaacaaaatacttgaagaaacaatggctgaaagctttggaaggttgatgaaacctgtaatctatacatcaaagcagctcaggccgggcgtggtggctcacgcctgtaatcccagcactttgggaggccgaggcgggcagatcacgaggtcaggagatcgagaccatcctggccaagatggtgaaaccccatctctactaaaatacaaaaaattagccgggcatggtggtgtgcacctgtaatcccagctactcagaaggtagaggcaggggaatcacttgaacctgggaggcggaggttgcagtgagctgagattgtgccattgcactccagcctggccacagaccaagactccgtctcaagaaacaaaaaaccagcccaacaaactccacgtagaataaacacagagagatgcacaaagacataatgaaggtgccaagagtcaaagacaggggaaaaatcttgaaagcagcaagacaaaacaaatcatcacaaggaaaccccaatattaggttaaagccgacttctcagcggggcacggtggctcatgcctgtagtggcaagaccctgtctctatttatttttttttaatcaaaaaagggaactctgtagacagacacaaattactaaaaatgacttaaaaaaaaaccccagactatctgaatataccctataacaagtggagactgaattattaataataataaaaaaaaactagttaacaggctgggcacagtggctcatgcctataatcccagcactttgggaggccaaggcaggcagatcgcttgagtccagaaatttgataccagcctgggtaacatgacaaaaccccgtctctacaaaaaactaccaaaactagccgggcatgatgtcacacatgcctttagtccctgctatttgggaggctgaggtgtgaggatcgcctgagcctgagaggtggaggttgcagtgagccgagatcacaccgttgcactccagcctaggcgacagagtgagaccctgtctcaaaaaaaaaaaaaaaaaaaatctagttaacaaaagccaggcctagatggcttcataagcaaattctacgaagcacttgaagaattaatactagtatatactagttcttcacaaactcttccaagaaaccagaaaaggaagaaaaatgacaactgtatgaggccagtattaattaacctgatacccaaaccagacaaatatatcaccaaaacactacagactattatcttttatgaatatagatgcaaaaattctcaacaaaatagcagcaaaaccaatctaatatataaacataattacacactatgaccaagcaggatatatcccagggacacaagggtgttttatatccaaataaaataatctaacatactgtaacaacacaattaaagacaaaagccacatgatcacctcaacagaggcagaaaaagcatttgacaaagtccaacaccattttaagataaaacacttaacaggactagaagggaacgtcttcaactcaatcaagggcacctatgaaaaacccacagctgacatcacacttaatggtaaagactggtgctttccctgtaagatcagaaagatgaggacatccattctcaccacttctattcaatactgtattggaggttctaaccagggcaattaggtaagaaaaagaaataaagtgcatctagattggaaaggagaagtaaaactaactctatttgcagatgactgatgttgtacaaagaaacccctaagaaatccactaaaaactaggttgggcacggtggctcatgcctgtaatcccagcactttgggaggccgaggcgggtggatcatgagcaggagattgagaccatcctagctaacatggtgaaaccccatctctactaaaaatacaaaaaattagctgcgcgtggtggcgggcacctgtagtcccagctacttgggaggctgaggcaggagaatggcgtgaacctgggaggtggaggttgcagtgagccgagattgcaccactgcactccagccagggcgacagagtgagactctgtctcaaaaaaaaaaaaaaaaaaaaaaaatccactaaaaactattagaactaataaacattattttatgtttttatttttattttattttatttatttattttttgagatggaatctcgctgtgtctcccaggcacagtgcagtggtgcgatctcagctcactgcaacctccgcctcccgggttcacgccattctcctgcctcagcctcccaagtagctgggactacaggtgcccgccaccacacctggctaattttttgtatttttagtagagacggggtttcaccatgttagccaggatggtctggatctcctgacctcgtgatctcccgcctcagcctcccaaagtgttgggattacaggcatgagccactgcgcccagccttatgtttttattttttagagacagggtcttgctctgtcactcatgctggagtgcatggtaggatcatagctcactgcaacctcaacctcataggctcaagccatcctcttacctcagcctcctgcgtagcggggactacaggcacttgccgccacacctggctaacttgtttcttttatacagacagggtctcactatgttgcccatgctggtctcaaactcttggactgaagcaatcctcccaccttcacctcctaaagtgtttggattacaggtatgagctataatgcctagccatagctgaaatattattaaaattatgaaatattaaaaacaaatagttcagtgaggttgtagggtataatatcaatatattggctgagcacagtggctcatgcctataatcccagcactttgggaagctgaggcaggaggactgcttgagcccaggagtttgagaccagcctgggcaacatggtgaaaccctgtctctacaaaaaatacaaaaattagctgggcatagtggcacatgcctgtagtcccagctacttgggaggctgaggtgggaggattacctgagcccaggaggttggaggctgtagtgagtcatgatggtgccactgcactccagcctaggcaacagagtgagaccctatttcaagaataaaaaaaaaaagtatttttatacacatgcaaaaaaaatccaaaaatatcaagaaaacaattccattcataatagtaacagaaagaataaaatacttataaataatcttaacaggccgggcctggtggctcatgcctgtaatcccagcactttgggaggctgaggtgggtggatcccccaaggtcaggagttcaagaccagcctcgccaacatggtgaaaccctgtctaccaaaaatacaaaaaattagctgggcgtggtggtgcgtgcctgtaatcccagctactcaggaggctgagacaggagaattgcctgaacccaggaggcggaggttgcagtgagccaagatggcaccactgcattccagcctgggcaacaagagcaaaactctgtctcaaaaaaaaaaaaatcttaacaataaagaacaaagcttacaccctgaaaactacaaaacctttgaaagaaattaattcatttactagatctcagtaaatgaaaagacatcccatattcatggattagaagacttaatagctatggtcaactgactttcaacaaagatgccaagatcattcaatggggggaaaacagtctctttcatttctttttcaaatggtgccggaacaacttaatatctagatgcaaaaaataaagttagaaccttacctcatacgatataaataaattaactcaaatggaacaaagacctaactgcaaaagctaaaaccataaaattcttagaagaaaacacaggggtaaatcttcgtgaccttggatttatcaatagattcttagttatgacacccaaagcataagcaataaaagaaaattggactttataaaaattaaaactattgtgctacaaaggacacatcaagaaggtgaaaaaacccacagaatgggtgaaaatatttgtaactcatatcaaatatgggactttacaaaaagaactctacaaaagacaacacaattaaaaaatgcacaaagaacttgaatagacatttctccaaagatacaaaaatggccaaccagcccatgaaaagatgccattagtcagttatcagggctacgcaaatcaaaaccacaatgagatactacttcccacccactaggatgactagatcaaaaagtcagaaaatgccgggcgcggtggctcatgcctgtaatcccaccactttaggaggccaagacagggggatcacctgaggtcgggagttcgcgatcagactgaccaacatggagaaaccccgtctctactaaaaatacaaaattagccaggcgtggtggcacatgcctgtaatcccagctaggagaattgcttggacccgggaggcagaggttgtggtgagccgagatcgcgccattgcactccagcctgggcaagaagagcgaatctctgtctcaaaaaaaaaaaaaaaaaaaagtcagaaactaagtgttggtgagtatgtgaagaaatcaggacccttatatgttgctggtggaaatgtaaaatggtgcacagtcactttggaaaatagtctcacaagttaaagtgttattatttgatcaagacattccagtcctagtcatatactcaagaaaaatgaaaacatatgtccacataaaaacttgcacaataatgtttctaagagcattattcataatagccaaaaggtgaaaacaacccaaacacccaaaaagataaataaacaaaatgtgccacatctatctacacaatggaataatatgaagccatatgaaggaatgaagttctgatacatgctacaatgtggctggaccccaaaaacatcatgcttagtgaaagaagccaatcacagaagaccacatattatgtgattctgtttatatgaagtgtctagaataagcaaatagagagagatagattagtagctgcctaaggctggaggaggacaagaggttgggggggctgatagctaaagggtttctttttaaggtgatgaaaatattctgtaatcgactggttgatgactgcagaattctgtgaatacgtgaaaaaccaatgaattggttttttttttcatttgtttggtttttttagagacagggtcttgctctgttgcccagtctggactgtggtggtgcaatcataacttactgtaaccttgaactcctagcctcaagcgatcctcccaccttggcttcccaaagtgctgggattgcaggcatgagccaccacgcccagcccaaagactactgaattgtatactttaaatgcgtgaattgtacagtatgtgattctatctcagtaaagctgttaccaaagataacaataattagaagctttccattaatctctacagtctagaattctaaaaaatacagtatttagactgtattcaaattatctctgtaaaccaatgacttctggtgccttctaaatatctttcatcatccttccaaacctctctacggttaccagctgctatggcttgttcttttttttttttttaacttcttttaggatcaagtttgagtttatattttgctatcacctctcccgtattttccaacttttttttttttgagacagagtctcgctctgtcgcccaggctgaagtgcagtggcacgatcttggcttactgcaagctctgcctcctgggttcacgccattctcccacctcagcctcctgagtagctgggactacatgcacctgccaccacgcctggctaattttgtttttgtatttttagtagagacgggtttcaccatgttagccaggatggtctcaatctcctgacctcgtgatccgcccaccttgtcctcccaaagtgccgtgcccattgttttggtttttttgttttgttttgttttgtttttgagatgagtctcgcagattgctctgcgagtggcgcaatctcggctcactgccacctctgcctcctgggttcaagcgattcttctgccttggcctcccgagtagctgggattacagtgcccgccatcacgcccagctaatttttgtatttttagtacagacagcgtttcaccacgttggccaggaaggtctccatctcttgacctcgtcatctgcccaccttagcctcccaaagtgctgggattacacgcgtgagccaccacgcccagccagattttccaactttcattaatgacatatagtttccaccctctgcagtcttctaacccctactagttcctagcataagaatctgtttttaggccgggcgcggtggctcacgcctgtaatcccagcactttgggaggccgaggcgggcggatcacgaggtcaggagatcgagaccatcctggctaacacggtgaaaccccgtctctactaaaaatacaaaaaattagccgggcgtggtagcgggcgcctgtagtcccagctactcgggaggctgaggcaggagaatggcgtgaacccgggaggcggagcttgcagtgagccgagatcgcgccactgcactccagcctgggcgacagagcgagactccgtctcaaaaaaaaaaaaaaaaaaagaatctgtttttggcaagttccctaaagcttctctgttgccaaagccaactgacattttccttttcttcccagaactcttggtggcatttcccaatcctgagtctctgcaaccagagagacccctgaccctgtccaccgttcagaatcatcacaccgaaaaagaccagagaggaattgtgatgagcatggaagaagatggagaaatgctgcttcccatgctcaccttggatgcgaacatctgttcataaaccccaccaccctcctccagggtgaagacagccaagcccctctttggcccagacctggtcctgggcctctttgctctctgcccatacacagccccttcacccccacctgcaacacagcatgtcatccattcaatcaaaaaaacacctactctggcttccatgctaggcactggagcaacactggaaaatgagacagaatttgctcattctcttgccttatgttctccatgccgcacaacacacttccctactgctccctgctccctgacaatcttggcagcaccgctgtcctcccagttccccaagtcagaaaccagagtcaccccaggcttctgatcactcccacatgccagcccccggctcccttccttcaactgctcttctccccttcactcccaaggtggggtctcctcttgtctggagactgcaggagctcctccttggcccccaccaccccacccaggtgcaggcctgaagtctctagttcaacaccaactctaacctgttaatcccacacttgaaacttaactgcctacaggaacaagcccaggcctctcagtgcagctctcctgagcctcaagcccaaccccctcctccagcaacacttgcactgtatcatctccatttggtttctgaacctaatctggcgctggcccctatgaacatggaggtccccatatcccacagaatatatcaccttctcccaggcagagtccccatctctcacccctctctctgtagctgtgctgcctgcactgagctggaaatgtccatatccacctcctcctgcctccactgcagtccctcacgggctggcagaggttccaactgcacaacctccccagaggcctcactcaatctacccacaggacagagggagagcactgtggccactcaccctgcggttccggttgtgatccatggtcttcagatgcttctggatgatcccaaactgcatgggaatgaagaggtcgcaggctgcacaatgggctgcctccaccttcttcacaaaatgctccatggcaatttctgtagtggggaggagggagtcaccactgggcccaggtgcctaagatagacccaggtgttcgagaaaaaaaccacaccagctcctcctcaactcgccctgccacttccacctgggcctgagccaaggctggtctcctgaccttccctgggggaacagaagggtgtcctgaccctgcaccgaaaatcaggagtgcaggctgaggccttgcctggtgggagtgggctgaaaatctcctcaccctgggtcagatcctggtctctgtagatttgctggatgaggccatcaaggtcctccacggtttttcggagctcctctgtcttcttggtcttgttagtgacgtactcctgcaaggaatataaaggttcatgtgggccgccttatgttctcaggggtccaagaaactaagagcggctgtgttactccaaggctcacctgcagaaagtcagccgtctgcttagggagcttggtgcctacgtacttaaagtgttccttgtggaacttgctgtcaagatggctggccatctcgtcctcatagaaggtccggtatttgcacagagaacacacaaactggatcctgccacaggaaggaaacgaggggctgaggctgcaagtgtcccaggggatagtgctgccgcctcacccaacccagacacaagccctgaaacaggccttgctcacgggcctctgaagtacggtcccagcagagggacaggctgggaccagtggggtcgggagtagaaagggccagaaagtctgcaggctgcagttactgcaacgtaggggacaggggaggagctcttccttcccacaggcaggaggctgaagcctgagacagcagctgctgcaacaggcaacgagtcgctggaaagttgctggagggcctcgctaccaaggctgggcaggagcgtgtgcacttggcccaggtggggaccggaaggaaggatgccctggcgtgagccaggtggccctgaggtgcagagtggagtacgcagtcccgaggcagggcccgaaaaggtgctgcatcttccttctgggatctgggggactcaaaggcccagcccatcctctgctcagaatgcttgggggtggtgtcgggagggatgggaggcagcaggcctgggcacctgctgcctcatcttcctcttccaagaagagaccagtctgagctggaaggagggcgcccgctcggcctgccagagggcagcctggagtcacctgggcgaggtgctctgtctgggcctggtgtccacagtagaagcccggggtctggggcctgggccggagcaggccgccgtggcaaggggcggaggaggccagccgccaccgagacctcggggcgggtccctacctctgccggacgtccttatctgggccacggggtcagctttgtctggagagcccaggggccgggcgccggcgaggctgaggaaggtccagcaagagcaagagtctgaggcggaggaggcaagcgccagtgcgggagccctgagggcagacagacccgaccaaggggcgtgaagggctcagccgcagacaggcccggcctgacagggccggcgggcagggcagaaggcaggcccgaggctgccacagcccacaggtgctgccatctctcctgggcacggcggtggcctcttggcagctagctggggcggcacaggcgccttggaccttgagtctctgatgagctggccccctccctcaggggcatcaggcccccagtgcaccttggggttcgtgcgccgagtgacctagcgccagagcttctgagcaacggtgccgagcggtgtcaggtctcggcccacagacgccagcggtcgccaggcggccgcagaggggcaggggatgagtcaggccttgggagctgggcctggcgggaagcagggtccatgcacggccgagcaggtggcggctcccaagggaggccagagggcggcgagctggcagagctatggccctgctctcctggcggcagccccacagcgaggcagaggcagaggggtggagggaagctggttacctttccaccatgcggtctcgctgccgctttttctgcttgtcctgactcttcttgcctgcctgcaacttgcgcttggtctggccattttcatcctgggtggttagggcccctgtgggagcagatgggcactgtcaccaatttggctctgccaggacagggcaggccctgcggcctctggctgaatcacccactgtccactccagagggtccatcgagaatagctgtccaagcaaggcctctggccatgagcagggctgggtatcctgggctgtgcagggagtgggtttggcctaggccccaaggagtgggggccaggcgatgacccctccactctccaggacacccatgctctctgtgcagtgggccaggaggaggctggaaagcaaagagggggtatctttgtggggacactggcacatgttcagaggggccaggtggtgggatgcagggaggctgctcacatggccctgcccacccccaaccgggcaccgcggcaacagtgggctgacgctggatttgctgttaggtacctgctggcgctcatcactcaggtggggggacacggaatcccaacaggggctggagaggtgctaagggagaggatacgcacaccagagccgtaaaaactgcaccgagggtcccagatcggacaccagccactgaggacttggaactgcgcgttactgagggaccgagggcagggggcgtgcctggggttccccacacttttactagctgcccccatctgaaggcaaaaccagtgtgctaggcaggggtcaccaccatccacagcctccgcctgggaaggaggaggaagagtgggaagggggtggaggcggcgaaaagaaagccccctgccagcacacactcgggcccacaagggaggtccccaactggccgcatgtctgccgcaaccctgccctcagctgggtccctcccactgtgagcccctggaagagccgccctagcaccaggcaccccaggaaaactcacccttctctggatcctctttgccttcttctctcccatcctcttttccctcctcatcctctccgtcctaacaatttcaaattccaactttaaaacaggtgcctttttttttttttttaaaagaaaccaagtttattagagcaacggtatatagtaaaacagctgcttgctccatagacagagcagggctatcctataggcagggtggcccagagtagcccagttatttacaatggctttaaatgacaaggcccggctatgtgccagaaacctcacatcctcccactacctggtgcacaggggctcatcccattttccaacaaggaaactgtgcctccagctaggcagcctgtgctttctgccagaccacactgcctccccatgctggtcaccatgcacgcagagctgacacagcattgcctctggcccccagggagagcaccactctttaggccagctcgccctgcctgcagacagaaaatgcccagccagagccacttaccactctggagcccttctccacagcctcggtgccttcaaggccctctgtggcttccccctcggtgccctcatctgaaagggaaaaggaggtaagctcaacccaggagttcccagaggcagggggcagccgcccagtaccacctagtgggctcaccattgtctgagtcgctgttgtccgagcagtccgtgcgggtggctttgctatctggctcatcaggactgccgccctgctttctcttcttcttcttggtctgggtcataagggggggaagccgtgtcagggtgcatggcacccggcccttagctccgccccagtgggaactaagcttcccagaggggaaggctgcctccactcactcggaagtcggctgtggtccaggtcttccaggtccgcctcatctgcttcatgccattgccaaacccgaaaccaaagcgggagccgcccgggaaggcgcccccacctcgcatgccctggaacatgccgtactcggggatgatgttctgggagaagagggagggcagccgagaggcaccagacatgcactggccccgggcccccatggggtcttcccacatgcgcccatagcctgaggccattggccggccgctccgggcatcccgggcccagccctgtgccctgggaccgaaggtgtcgttgccacgcatgcggaactggtcgcggtaggcatcgtattggccctcataggccatttccatctcagggtcaagctcgctgtagtcatagcctgaccggtacaggtcgcgctcactcaggacggccctcgagtcgcaggactcataagagtcatacctgcagaggcatggggtgagcatcaggtggagcccctcaggatccctcacctccaggcaactgctcctgccctccccaatctcccagtccagcacccaccctgccctggttgggaggctcaatgttcagaaatgccgattaaagagttccagcctctcagctgatataggggcaccactgccccaaacttgaatgtagccacacactggcttggggaccctaagaaggactgaaggactgataactggggtggaggctctagtccagtgagtctcaacaaggggcagagctgctccacagccctttgggaacatgtacaccatctgtgggagctgcaacgcccaaggctgctcctcacagggcaaggctgagcaccccagcaccctgcaggatgcaggcaggtccagcacaatgaatgcgcagccagtgaggctgatgatacccatgggaaacactgttcttgtccctcatggctggggaaccttcaaactctgcaaagtccctcattaccaaaacaactgagacaaaagggggagtatttcccagggaagacactgagagcttgcccagggacaagaaaaagagctgtattacatcaaccctggagcccagagccagacaccaaactctatataccctgtattgcaactgggaaggcaggccagacctcctcccaggacacagagggcaccgcagagagctcttttaaccgtgactgcagcccgcagcccacacccctacaggcctggaccccacacacctcacaggcacaggggctccccttgcacactcttccctaaacctgggccaccaagaggcaccggcagctctaagagcagcagttggtgctgccgctgctctgcttaccccgatcccaggctccaggctgtggtaagaaggtgcatagcagcaacgcaaggccaagcctcacatgccaagccctcagctctgagtgctgcagctgttgggccaggagttacagagcccatggcatcaaatccccttgtgcctgttccacaccctgccaccacagccctggggcctcccttggccctatcagtgctcagccaggcaactccttactcttggctctcactcatctgttagctggtgctccactctatcccatgttagagatacacccacgctcctcaccaaagcctcgcactgggcataagcactcctgggccaagtccagttcagttaataacaaatgcccacagcatgatgctttggagtagggcagatctggtaggcgaggcccagccccaccaagtacttgctgcgtgccttcagggtatgacctgcctgcacttctgtatccccacctgcaaaatgaggacagcagcagttcctcacaggagtgcttccatcaggtacatgtttgtaaggcacaggagagtaaccaggaaatgcccacacctgccccgacccttacgtgggggtggcccagctcgcagtgatcagccccaaacgctcgtcccacccttcacaccaaactccatctgtcctgccctgacaccacgcaggaggcaaagtctcgagagaattccaaatggctgtccttggagggaggggtggctgaacactctgtttttgagggcacagtgaagtctgcccagtctgggcttgttcctctcaccgcaagctgggaaaggctgaccaccaggcagtgcggcaggggttgagggtgggtgagaggagacacaagtcagagacgggaagtgcaacggaccctgctgggagccacagcagcaccaagcagcggggaggaagcagacacagaggggcactcagagaggaaaacgcagtgggcagcaggcaggagccgcccctgcagagtctcaacccctaggcaggtgtccactcacctttctccacctgagccgtacacgcctccttgcatcatgtctgtctccaaatgcggcaccatatctaagcgctggttaattctggataaaacggaatcggcactggcgctacccgaggcactagtgtttgcatttgtgtcagagctaggcatttcccaagagtgtgaagtggccataccatacccatagttggtggtgttatcctggccatagccatagccatagccatagccctcgtagcctgcagtgagggagacagagacagacagatggtgggggcaggcagaggggaggcagacagagacagagacaaacacagatacaagggtatcttctgtcacagagagagaagaccctagccactgaagctagatgggccctggtcattctgatgagggcctcctgttaaggagtaggtaaccccagaaacatgccccctccccactcccaaccttggccaagcagggcagtggcagagaaacacagccaggacaaccccaagggacaggacagcaatcacaggaatgacacttgcctctatttgtcccagagttccaagttccatatcctacaaaaagtaaaagggcagttacatctatacttgcttacaatacaaggccataattcaggcgcagacaattattcccaggacctgactggtcagagcaggctgcacctcccctaaccgagaagccttgagctcgcgagcactgcgcaaatgacccaggccacttgctgccctggtgcctggctgcctgtggctctgagcatctgttatttaaggatccttctgttcccaacactctcaactaaggaacttggctcctatactcctccctttaagagccagaattagaaggtgacctccacaccccaagctaagtgctaatcagtttatagcagaaaacccaaccccagtctcccaagagtctgccttaaaagggagggccaacaagcccttgaattgttgactgtgctgtgctggaacacatcagtgagagaagcccaagaagcaacccctcgcttgagaaaagctgtggagagaacaatctggattatcaacttaatatgctctggattcaatcacaacacatgataaaacctcattccttcagtaacataaagccactgagaagtgacaaagtgtaaagtcccctgggaactctgagtcaaacacacagttcctccccaaaggagggcacagagcaggtgacccctttccctgggtctctggtgagacccaacagttgtttcccattccatgtcatctctgccccgcagaggacatgctcatcccagggcaggggaccgaagctcagtgagacagacagcagggcaataagtggcagaagccagaccacagcaggaagagtgtaagtcaactgaaaagatgagccagagagaacaggcaggctgtcgtcctgcacttgggttcctccacgacccagtgcacaaaaagaatgggaagaaatcagagagaagctgaggaactgctgatgaccactatgtttaacaagagagctcacaaaacaaaaactcttgggctggagaaaccaaaacaggcttctcatccatttgtttatgtatcccctgagcacagggaacagaggcttgcagtcccaggcactgctcaggcatggagatctgcctgttggtaagagagatgctaacagccagagagcagcatgggtaagtcaggagtggtagctgaggaaagaatggagccattctaagaggcaagagaggctggcagagccacataaagaaaaacacacaaggctgggtgcagtggctcacgcctgtaatcccagcacttcgggaggtcgaggcgggcggatcacctgaggtcaggagtttgaaaccagcctggccaacatggtgaaaccccttctctaccaaaaatacaaaattagccaggcgtggtggtgcacacctgtagtcccagctactcaggaggctgaggcacagttgcttgaacccaggcggcagagtttgcagtgaggtgagatcgcgccactgcactccagcctgggcgacacggtgaaactccatttcaaaaaaaaaaaaatagaacaacacacaggtagcccaggcagctactgtacacctggccaagtgactgtttgtaccagggacagtgggcactagctattctaaagaaaataggagttgggcgtggtggctcatgcctgtaatcccagaactttgggaggccaaggtgggtggattacgaggtcaggagttcgagaccagcctggccaatatggtgaaacctcatctctactaaaaatacaaaaattagccaggtgtggtggtgcgcgtctatggtctcagatgcttgggaggctgaggcaggagaatcacttgaacctgggaggtggaggttgcagcgagccaagattgcaccactgcactacaggctaggcgaccgagcgagactctgtctcaaaaaaaaaaagaaagaaaagaaaaagaaaataggatatggaggcaaaagcagatccatcagggctctgcttgggaggctacaatgtggtcactgcaagcttcacctgctgaggatctgccacaacagagtgaggaggcacaacgaaaggaagcagcatcaactccgtgaacaccactttacgttttaaggacaagcagggcctcccacgatgggcaactctcaggagtccctccaggcaaacactcactacatgccacttgctatgcctggagcaacccagactccttgatggacatcccagctgggtcccttcaggaggaagccttcatctagactggcgtttagggactccccaagacctgccctttctgaaagaacaccccaactcatttccatccccagaagggatgagatcatggttgacaaaagaaattttaaggagagagagagagagagagagagagagagagagagagagagatccttaaaatttatatatttattattattaaatatatacatatatatgtaaaaataagatatatgtacatatatatttttgagatagagtcttgctctgtcctccaggctggagtgtaatggtgtgatcacagctcactgcatcctcgacttcttgggttcaagtgactcttctgcctcagcctccggagtggctgggacaacaggcatgtgccaccatgcccagctaattttttctatttttgtagagatagggttttactatgttgcccaggctggtctcaaactcctgggggctcaagcctcccatctcagcctctcagagtgctgagattataggcatgagccactgcacctggccccaaggacataatttttaaaagaaaaaaggacatggtcacagtatgtgatatttatggaccaaaaatagaaaacaatttaacactcaactttaacgtaatagttaatcagattacacctacctactcggtgacatatcatgtaagcatataaaaagaatttactatgccttatgtggcacaaggaaatgcttctaacataaaataaagcaggaccagccaggcgcagtggctcacacctgtaatccttttgggaagtggggcaggcagatcgcttgagcccaggagtttgagaccagcctgggcaacatagcaaaaccccatctctagaaaaaatacaaaaaatagctgggcatggtagggcatgcctgtagtcccaattatgcaggaggctgaggtgggagggctatctgtgcccaggaggtggaggttgcagtgagctgaaattgtgccactgtgctccagcctgggggacagagtgagatcatatcttaaaaaaataaaataaaataagagcagtacccacaattctatccacctataaattattaaactacacaaaatcagtaagctgataaaaattaaacattaatatggtaggatcttggttgactgtttttcaaaatgttatttaaatgttatattgttcttgcaattcaagccagaaggaaaaataaatccatctctattctttcacaattgtgtatgtaaaaaaatctcaaacaaatctacaaaagagctactagaataagtgagcttagcaaggtttattacaaggtcaatctgtaagtcaaatttcaaatattacaaggtaaacctacaaatcaaatagcaatcaaatttctatatatcagcaatgaatggaaagtttttaaaagtaccatttcctatagcactaaaagcatgaaaaacttggcgtaaatctaacaaagtatgtgtaggatctgtgttgaaaactacaaaacactacatcagtgaagtgacatactgcactcatgaatcagaagacttgatattgttaagatgtcaattttctcaaactaatctatagattctacagatttgatagatctatagatccaaggctctctcactcaaaatctcagcatgaattttttaaaaaacttcataaactgattctaaaatttatatgcaaaagcaaagaaactaacaattttggaaaaaagaacaaacctggaggactcatatttcaagattactattaaccagtaatcaagactgcattgctgggcgaggcgcagtggctaatgcctgtaattccaacactttgggaggccgaggcaggtggatcatgtgaggtcgggagtttgagaccagcctggccaacatggtgaaaccagtctctactaaaaatacaaaaagaccgtgctgctgaacgaaatttagatgtacagaccaatggaacagaatgagagtccaagagtccagaaatagacccacagtatatggtcaactgattttcagtaaaggtacgaaggcaattcaatagagaaaatataggcctggcacagtggctcacacctgtaatcctagcactttgggaggccaaggcgggtggatcacctgagatggggaattcaagaccagcctggccaatgtggtgaaaccgtctctactaataatacaaaaattagccaggcgtggtggcacatgcctgtaataccagctatttgggaggccaaggcacaagaatagcttgaatctgggaggtggaggttgtggtgagctgagatcgcgccattgcactccagcctgggcaacaagagcgaaactccatctcaaaaaaaaaaaaaaaagaaagaaagaaagaaagaaagaggccgggcgcggtggctcacgcctgtaatcccaacactttgggaggccgaggcgggaggatcacgaggtcaggagctcgagaacatcctggcaaatacggtgaaaccccgtctctactgaaaatacaaaaagattagccaggcgtggtggcgggcaactgctcgggaggctgaagcgggagaatggcatgaacccaggaggcggagcttgcagtgagctgagatcgcgccactgcactccagcctgggggacagagtgagactctgtctcaaaaaaaaaaaaaaagaaagaaaaaatggttttgtttttgtttttgttttttaaacaaatggtgctggaacaattatatatttatatgccatagaagaataagaaaccttaacctatactgcacaccttgtagaaaaattaactcaatatggatcacagactaaatgtaaaacccacaactaaaacacctaaaagaaaattctaaagaaaatattacagatttcttagatataaaagcaaaaccatcatctattaaagaaaagattgaattgggcttcaaaattaacaacttgtgttctttctgacacaagacaagacacactgacaagagaatagacaagccacagtctgggagaaaatatttgtaaatggcatatccgagaaatggcttgtactcagaatatgcaatccagagggaaaataattcaaaaggatgtgcaattagggactacatttgatgaaaagggagaggcagggagggcagcacagggaagtcaagcaaaccaagtttctcctcatttatgagacacctgataccttctcactcaatttcaaaatattttaagtcttcccttttcctgggactagctgctgttacttggggagcttacttaagtctctttatgcagtgacccctgaaggcatgttagctgtgtaggatcagtctttccccagatcttggtagtaaaagaaattacccatctcagtaactaagacattatccctgttaattccaaagagggctccttctcaacagatacccctagagtcacagacaaccaaaaaccagctttaacagcagtccgggctgccacagcacacaaacaaaacagcatctgtgaatcctactggtggctacttctgaattagctaattaggtgtttctgtccacgctggaaaactcaatcagagatcttcactcaactctgtgtgtgtggagcctgctggcttgaggtggcctggctgagtctccaaaagctgccagattcacacactcagcctctctcccacagcaaggacatgcactatgctgggactaagttaatagcttgctttctcctggaccaatcctttggacttttttttttttgagacagagtcttgctctgttgccaggctggagtgcagtggcatgatatcggctcactgtaacctctgcctcccgggttcaagtgattcccctgcctcagcctcctgagtagctgcgaccacaggcacacaccaccatgcccggctaattttttgtattttagtatagatggcatttcaccatgttggccaggatggtctcgatctcctgacctcaagtgatccacccgcctcggcctcccaaagtgctgggattacaggcaggagccaccgcgcctggcctcctttggactttaattggccactgtgactcccagtccctcccccatggggatttgaagccaggccttttatcaaagagcctaacttgctcaggaacacagctacttttcccataattgcctgaaagggaagcactagctattcaaatggccacaccatttcacacaagtttaggtttaaaaaagcatgacagggtgacagcaaagccaaaggcaactaagaagacaaggaactgctctgcagaacactttggttcccaccagaagtccacacttaccataatcacaggtgggctgagcgctggtatccgagtatgtcgactgcaaagtggtttcagatccctggacaaagcctaaacataaagacagtggggttaatttccacaagcaagtcacagggaaatgacctgagactacctaacctttggtataggattgccagcaggcccttctctcaacgaaaagccaccaaaacctctagattccacagtttaattagaccgtcagaaaatattacccaatggaaaggcaggctatgtttaacttgctataccaggaggactagattaaaaaattatttatttactttttaaaaacaaggtctcactctgtccgggctgcaacgcagtggcatgatcacggctcactgcaacctcgaccttccaggctcaaacaatcctcctgcctcagcctcccaagtagctgagactatacgttcgtgccatcattcgcagctaatttttatacttttttgtagagatggggtttcatcatgttgccctggctggtctttaattcctaggcttaagcaatccaccctcctgaacctcccaaagtgctgggattacaggtgtgagccacagagcctggccccaaataaaaatttttaaacatttaagccagtagcctattttgagaaatgaacacccaagttatcattctgttaaatgaggaaactattcaaatccctgaagggtgagccacttggaattcaaacaaggatggaggttagcttcaaaaccatgttaaagcaaataatacccccctccctgttctaaatctgaaacagaaactgctttttattttggttttcccattaaaaagtgtgtataacaattataacaattatttctgggccgggcagtggctcatgcctgtaatcccaacactttgggaggccaagatgaccagcctgggcaacagggtgaaaccctgtctctacaaaaaaaaaaaaaagccagctgtggcagcatgtgcctgtagtcctagctacttgggaggctgaggtgggagtgtcacttgagcccagaaggtcaaggctgcagtgagctatgattgcgccactgcattccagcctgggtgacagagcaagaccctgtctcaaaacaaaaacaaaaacaaaaaacaattatttcttaaaagtaattatttggggtggcatggtcatatggaaataagtattattatatatacataaaatttcctatcttctcaactttcaaactatttctcaacataaaatgaattagggctggatgcagtggctcatgcctgtactcacagtactttgggaggccaagggggggtggactggttgaggccaggagttcaagaccagcctggccaacatggtgaaaccccatctctactaaaaatacaaaaattagctactaaaaatacaaaaattacagggcacagtggctcacgcctgtaatcccagcactttgggcggccgaggcaggtggatcacgaggttaggagttcgagatcagcctggccaatatggtgaaaccctgtctctactaaaaatacaaaaattagctgggcgtggtggtgtgtgcctgtagtcccagctgcgcaggaggctgaggcaggagaatcgcttgaacccaggaggcagaggttgcagtgagccaaaatcatgccactgcattccagcctaggcgacagagcaagactccgtctcaaaacaaacaaacaaaaccccaaaattagctgggtgtggtggcacctgcctgtaatcccaggttcttgggagggtgaggcagaagaactgcttaaacccaggaggcggagattgcagtgagtggagatcgtgccactgcactcaagcctgggtaatagagcaagactccatctcaaaataaataaataaatgaaataaaataaaatgagttagtgccaagtaaggaaaacttctacctctatcagaaaccagtgctcctacagactatgactgatgctaatcctgacacttgctttaaaactacattaaaaaaagaaaaaacaacaactctacagttagaaatacatatatatttttttgagacggagtctcgcactaggttggagtgcagtggcacgatctcggctcactgcaacctccacctcccgggttcaagcgattctcctgcctcagccttctgagtagctgggactacaggcgcgtgccaccatgtccggctgatttttttgtatttttagtagagatggggtttcaccatgttagccaggatggtctcgatctcctaaccttgtgatccgcccgccttggcctcccaaagtgctgggattacaggcgtgagccactgcgcccggccagaaatacatatttttgaataattttctctcagcactgaaattacgacagataccataagaggcagtatttgcctttcccatcagagccaactcatgacctgaaaattaaagcctatgcctttaacagcttgtttacatcaaaaacctacagaagtgccttccccctgggtaagcgttctcttatttgttgacagtgtctctattttatctcttaagaccacagcagcagcagccaacagcaaacaagtgctttccctgcagggtgctaagaacatttatctgcaatgatctcatttcatcctcaccacagacaataagggcaggtgggcaagattccttactctgcaattcccccaggtccaaaagggtctgaacaccaagtgttttctaccagtgtggtgccaaaactcacgctggagctgttttcacctgtaaggacatttataatctttctttgtcctacttagtgcagaattaatctatttaaatacaaggtgcttccccagaccccacgtgacttctcttaagctagaattccaaaatacatctagctccaagggttccaaagacggagctgtgaacccagcttcatcttcactttccagagtagggactgggacttgaggcaggataaaaccgagggtatacagatccagtcttctaccttccctaagtaaagaggctagaaatccattcaaatggattccttccagggatctggaccttcctgagatgcctaaaatccaggcattgttgattaatagctgtccataagaaacactgagagcagctttgaagagttcacccaggggaaagccttataatgtaaggaatacccagcccctgcggtctccactgtttgctcaactggcctctggaaacttgttctttcagcaattgggccaccagtaaaatggcctcagactttaggtaatgtgatctgtgagtactgcaactgcaaatgacagcctaccacaccctcacaagatacagtcagcaagctgctgagcaaaatatctgtgtctgttcaggcgagaggggccctggtgcttccctaggaaggaaagacgatccatcaaaccctccaagatcaatggcaatctctgctctaactctataccctgcaccacattaacattctgttccacaataccatctgcaaagatcgcagagcaggcccttctgtagccagttttggctcctattatgaataattcttttttttttttttttttttttgagacggagtttcactcttgttgcccaggctggagtgcaatggtgcgatctcggttcaccgcaacctccacttcccaggctcaagcgattctcctgcctcagcctcccgagtagctgggattacaggcatgcgccactacgcattttgtatttttagtagagacgggttttctccatgttggtcaggctggtatcaaactcccgacctcagaagatctgcccgcctcggtctcccaaagtgctgggattacaggcgtgagccaccacgcccggcctaaattcttagctggtttgtaaagtgttctcttggtacaatttatcagcctgattagcgctggttgaaaaaaataaaatatgccctatatggccctataaagctaaatgttagatcacagatttctttttttttttgtttgtttgtttttgagacggagtctcgctctgtcgcccaggctggagtgcagtggcacgatcttggctcactgcaagctccgcctcctggggtcacgccattctcctgcctcagcctcctgagtagctgggactacaggcacctgccaccacgcctggctaattttttgtatttttcacagagatggggtttcgctgtgttagcgaggatggtctcgatctcctgacctcgtgatccgcccacctcggcctcccaaagtgctgggattacaggcgtgagccaccacgcctagcccacggatttctttctttctatttttattagagacagggggtctcactgtcatccaggctggagtgcagtggcacaatcactgctcactgtggcctcagcctccggggctcaagtgatcctcctacttcagtctcctgtatagctgggactatagccacgcaccaccaggcccagctaatttttgttttctttttctttttttgttttgagagacagggtctcactatgttacccatgctggtgttgaattcctgggcttaagcaatcctctcactttgagaccatggatttctagttctgcagcaacactccttgcttttaaccaatctctcgtcaactttttttgctcaaaaatacaaaagcaggccaaatgctgtggctcatgtctgtaataccagtactttgggaggctgagttgggaggatcacttgagcccaggagttcaagacctgcgtggcaacatagtgagacctcatctcagaaataaaaaattagccaggcatggtggcatgcacatgtagtcacagctacttgggaggctgaggtgaggtgggaggattacttgagcacaggagggcgaggctgcagtgagctatgattttgtgccactgcactccaacctgggcaacatagtgagaccctgtctcaacaaaacaaaacaaatgcttctcagttttatacttttcctttctcctttttaaaaaagagtatatattttcttgagacaggatcttgctctgttgcccaggctggagtgcaatggcatgatcatagctcagcaatgttgaactcctgggctccagcaaacctcccagtcagccgggcgcagtggctcatgcccgtaatcccagcaccttgggaggccagggagggcggatcacaaggtcaggagatcaagaccatcctggctaacaaggtgaaaccccgtctctactaaaaatacaaaaaattagccgggtgtggtggcgggcacctgtagtcccagctacttgggaggcggaggcaggagaatggcatgaacctgggaggcggagcttgcagtgggccgagatggcgccactgcactccagcctgggtgacagagcaagactccgtctcaaaaaaaaaaacaaaaaaaaaatcccagagtctcgctgtcatccaggctggagcacagtggcacaatcatggctcactgcagcctcaacctcgcagagctaacttttttatttttaatttttatagagaaagggtcttgctatgttgcccaggctcatctcaaactcctggcctcaagcaatcttcctgcctcggcctcccaaagtgttgtgattacaagtgtgagccaccgtgcctgatctaaaaaaaaaaaagagtcttatttgaaggagtaacacagagtaccaaaaattaaaagataactggaattaggttaggttgccttcaatctttattatctgagccaagagtagggtgacaaccatcctcaaagatggtctccattcctgcctcttaacgttatgtagatccctcccaactaatagagctagccagtgcaaccaataagatttatgaaaatgactgagtgtgacttctgggattttcgccttgctctttctgggatcattcagtctggagaaaaccagccaccatgttgtgaggatactccagcagccagccctagggagagatccatggggccaagaattattggccagcatcagcctgccaggcatgggagtttaagtcaccttggaggtgggacctccagcctcagtcaggctttcagatgactctagtccacatagagatcctaaatgtaacctcatgatattccaagctagaaccacccagtgaaatcacctatccattccaaacataaagaaactgtgtgagacaataaatgtttctatgacaagtacagtagcatttcagacctttgtttgagggcctgattctggatatttctgtgctgtttaccactgctctcctcttcccctctcagtgctagagatgcagcttcctttcccacgtataaataaggtaacagggttcaaaagcagggcgagttaataaaaagatttatcagtcaccttttatgtttaataatgctaacatttgcttcgaggcctctaggacttacccttaaagctattagttgtctgaaatgtgaattaaaatgcctttgactttagtgccctacttcttaaataaggggaagactcacattgtaaattactgtggttttcagtttatcaagataaaggaaaaactaatcattacttttttagcttggctatctcagtgcccacccaaacccagaactacagcctacaagacctagagctggaattcaggtttggtcattagtgaccttgtatctcagtttcctcatctattaaaaaaaagagctccattactcagctaccccacagcacccaaccattcatcttctggtttcttcaagagtcctgtttttaaaaaccatgaaactgtcttccagttcttggtaagacttggtgagaattatattccaatcccagggatgtcagtaacaaccccatagtctttcctcctgaactaggaaagctacagaaaggctctggcagagctgcccaacttgggcactactgatgtttgacgccagatacttctttgcggtaggtgtcattgtgtataccgtagcagggcagcatcccaaacctccatccactagataccagcagcactcccactcccatatgtgacaaccaaaaatgtctccagacattgccagatgtcatctggggcagaatcacccctggatgagaacccactgggctgggggatggttgctagaaaaactggggttcttggaaagctcctgacctggcagccagggtagaggggactggcactaccttcttgcctatgccaacataaagtggtctacaaaggagccccacagactcacgttgcattctcagttctcaaaattccaagtagaatgcaggttacctggcaaccacacacgctcaagcctataataccctcaccaaacagggaggcctagtgtaagtctcctggccgagaagcctcatcagtcactgccaaggcaaacccaggaggccttggcaattcacccagtgatgatttacagtcgcccaagcatattgcggggggcggagaggggctctcggatctgtcacccactctccctttcaaatcccattggcctcccactggcctccctggctgatcttctaacaagccaggcagttcctgcccgtaagccttttacagcaaaagctccctgggccagatatctttattcgctccctccatttaggtctctgctcaaatgtcacctctttacagaaggctccaaccactccacgtagtggagcgacccccgcacggtactgaccaccctaaaatatatcctacactcgcttatttgcctattaagatcctcgcctctaagctgcttgaggaattcttgtctgtattcccaatacccagtctgtaccggacacggttcatttgacagacgcagagggaattaacatggaaccttgtcattccttgcagttcagcccctaggggcccaaggctccccgctcagcccaaacccttccaatatttacttatccccctagggcctggcgcctttcccagttctgaaatagacaaaagggggtggtgggtgggatcgggatgggggtgtagagctgcggcgtttttgcagagaaactgcgcgggggaggacgcgacaatggcgacggcagccgagcctgctgcctgctcgcaaggaccaaggcctgagaaagggaaacctaaggcgtcgaggtccaggagcgcaggccagggacggaggtggtgggggcggagacctcgtgcgctgaggcccggacccacggacacaggcgacagaagccaagacatcaggcggccgggagccgggacgccggctgcagacacagagagctgaggcaacgaggcgtgagggcagcgaccctgaggcgacgggccagcggcgccattttgtgaccgcagggaaggcagtgacggggccccaggggaggtgcgggcaagcctggtgcggcatccgcacgtccctgtcccatcccccacgcagagcccgaccccaccctgccaggcccacctgtgtagctcatggtggcgggcaacacaacatccgacgacgccggcttctgctgctctgaacatccgacgctgcgatagctgctgctaaccacagggtcccctccacacacacccgagccccgcctcccgaccgcattggctcataccggcctcggcttcacgtctattggaaggaaccgctgtctatctctatgcctcctcatatcagtggctggaagctgctggcaatctcgtgagagccccgccttgtccccgccttctgttattctaaggcctcagtgattggcctacagaagccggcagagaggcggagtcctatagaatttgagggggcggagctgtgcactacggaaaggcccaaggcccaagcatggtcgggctggaggagcgcccgtaccctggagacccgccagagggagtcgggtctacggctcagggcagggctgggatgccaactccgccaccgaggtgctgggtaggggacctagctaagtctctcaaattctctggccttcggctccaaaacaagcatagcaaagccatgttgagaagagaaaattaaaacagcaccaaacaagatgctggacacacgtttcaacattacgtgacaaagtgtgtgtaaagaaatcattctggtgccagtgcactgaataaatgtgattaatcgtaacaaaacgataatatatttatatggcatatgcttatatgtgtaataattccgtttgtattgtgtgtcattcgaatgctccttcaaacctgcaaaaagcttttaatcctcacttaaaactgaagcttggaactcatgatttgctcaaggtccttgacagttacgtgttaaaatgggagctttgcttctaaaaccctcctgattcactctgggctcgagagatcctgcaatagtgcagccgggcaccagtcatgtcctcagtctgtttcctgggcatatggaaaccctgccagggacaactcataatttctagagatgacagagctgcaccgaagagtacttaacacgtgtgtttgtgaaaactcattaagctgcgcaattacgacttctacgcttcgtgtgttttaaaactttttttaaggtatgctgtttctttttgatattgttgatttctttaggtgtaatagtggcatttacaacgttgagagaaacatactgaaatactaagaagttaactgatcttatggccaggatgtgcttcacacaattcagacaggtagagagaggaggaggaagcaaggagctataagataaatctctgacagctgaagacattggtcatgggttggtgatggatagatgagagtccattttactgtttgctctacttttgtatagttggaattctccatgataaactgttttaataaaactccccccacccaaatgaggcttctgcagaacttgctgccatacggaacaaagccacttctgatgtgttaagtgagcaaactccaaacatgaagcagagatctgacggataagcactctggcttcggggttcatctccccatcagcctcagggatgcctgcctgtcttccaaaccaaggcagggccccaggacacgtcttctgcgccctgcaggttcgttccttcatcgcacttgccacagtcatcattgtaccgatttgatttcgttcacatccaacaccctcagagaccacggctcaaaagctgagactttgctgcctgaggtgtattgaagtggcttgagcagagaagagcaatgctcagaaagttttaggaaaacatccccctgcaagaactggaggtgactcttccaaggacacacatgaccctcacttcactgcatgattggtggggaggaacttgccatatgactttataagctcttgtatcatttgactgttttttgtcacatctagcctataccacttttatatttcaaaaactgacttacgggccgggcatagtggctcacgcctgtaatcccagcactttgggaggctgatcacttgagctcaggagttcaagaccagcccgggcaacatggtgaaacccccgtctctacaaaaattacagatataagccaggggtggtggtgcatgcctgtgatcccagctacctggatggctgaggcaggagaatcacttgaacccaggaggcagagactgcagcgagccgaggtccctacactgcactccagcttgggcaacaaaatgagaccctgtctcaaaaaataaaataaaaaaataaaaactgacttatgaaaagttgaaagaggaagaaacacctttgagtcagctcacaagatgctctccctgcttcctaagtcctggatacatccacccacccacagcacaggatggagagaagtggttgcggccttctgccaccaggcgagatgtgcgtcctgaccccacaggagcagacgtgtgggccaagaccacccttgtgggcgttattgcagcctgttaatccctccttcccaggaaggggtatggtgggagggcccagaaagcagggctgggggtagaggtggccccttctgtccacacgccatgaggtcgttcccactctccagcacttgaccgtttagtaaaaacgatgagctgaaaaaccacatgcaataaacaagaaggagcagccaacaaaatctcttaaaatctcagaaatgttcaataaacatttgcagagcgagaaaataaataacatcgcaaaggagccagtggctcctcttttccccgcatgttccttgggtcaggggtgcatgtgtctcactagaagtcacatgtattaaaagcaggtgagttccagctctctacaaccccactggcccccacccaaatgctcccaacgggtccctgacaccctcgctggtagctcctgcctttgataagctcctctagcctcaactgcttcttgatcctggctcccttcccagacaggctgcccagaaccctggttcatctgctcactggagccgctttgccagccagccagagaccccctcccagccatggcctaaagagccaacagctgggaacttgggctcatccccagctgcgtctggtcggcttggcggccaactggaaaacccagggcctccatggcgctctggacagaggaggccccgatcccagccccggctgccagccaatgccagcctgtccacttgacagaaaaacacacgctggccgcctgccccagggtgtttccagaagagaaatttaatctaatttacatacttctaggtacatcgataaccaaaatgtggccactgaaaaaagttaaaaggtcaatcagctcctggcttctagctggcccaggattgcaaaataaaaagatccacgttccttattctctacacaaaacgcgtttttaaaaaagtgaaaggtctagggagctatacatagaaagcaacagtgaaaagggagagggagcaggagtgggggaggagagtcccaccccccaaccccaccctccagggccccagagcccctgaggctctttggggggccttgacatggcaggaggcagctgtcagctctgagctcttcccagctgggaaggcccctctcgggggcagccaacaaggatttccgtggcattgtgggctcagtggggggctcccaggccccagcaggccccacagagggagcgtggcttcccctgagcaagcaccgtggcatgatgtggtcgttcaacccaggaactgggggtccggggcaggtcccgggtctcacgaggtgcgtgttgtgtgtgttcgcatgtacatgtgtgtgagaggatattcatgggggagagagggaaccagaacaggggtctttggggtctttgcaaatggccacggatggcagacatcgccctgcctggctgctagacgggggagtgctgtcctcccctgtgaccagaccggctgccatcagagacctggctgctgcccctgctggaccaggtgggcatgggctgaaggaagacaccctgtggccccagagtcctcgggctgggggaagggcagctagctggctcccggcgccctggctgtagtgtgcccggcccccaaggggcgccggtttgaggttttggcttgctcctttggaaacggaaagaaagaggaagagggacaaggacacagaggaggaagaagaggagacagaggtggcacgagaggggatctggaatgcttttgtgttagggagcctctgccgccgctgtctgtgcctgcggggcctgggactcctcaggtggggggtccgctttggagaagttcatctccaggatgtgccgctgtaagtgccgcacccactcttcctggatggagagggggccctggaattccacctcacagaacctgcatgggggaacagagagagggagtggccagtgctgtgaggagaggcggaagcatagccttgccagcatccctgggcacacctgctgctactcagtgtggacagagccagcccaggaggcgggggaagagggacccagaagtcaggcgtttcccatggacagccacctccactcaccatggggtcatggcagggtctcacagagacccctgcctctgtgctcagaagtcactggtgccaggtaagggctactggcttccaggtacccctgccatctggcagatacatagaatctgagacagtagagggcacagagaagcaaatcctacccaacgcaccaagccccccacctcctcctgtcttcctggcacctaaaaaggcctcacagcacagaggcctggagcccaagctccatggctcaagacgtggctttgactctgacttctgacttggcctgtatggcctcaggcaagtcacctcacgtctcagagtcccagttcgctgctcttcaatgtacttgtggactttggtaagaattaactaagatctacttttttcttgagccagacactagttgagtgcttacttaccatgtgccaggcagttctgagtgctttataaatattaaattcacttactcctcgtaacaaatctgtaaggtaggtttgttatcaacccgcttttatgagtgaggaaattgaggtaaggagcaggtaagtccttccctgaggtcactaagctggtaagtggcagagttgggatttgaacccaggtctcgcaggctacaaagctcagggtgtcagcctttagcctgagccccaccacacccaagggcagccactgaggcgacacctcccagcttccaccaaaccctatcctgttccaaggctccgggtgaccaaggtccactcaggtggtctccctccctcccccaggggcagcctacctgcatttgagggtgtagatgttgcccacgaacttgacaagtgatgtctgggggggccggggcaccagggaggggactggccggactcggggtgggggttgccgcacctcctccagcttctgctgtaggtcattggtgtcctcgcctccccgggctgcggaggcatctggagggcgggcttgtcggcgttcaaattctaaggtggagagggggacgggagatgagtgggaggggtggatgctgcagagacttggaatacacaagagctgaggactgatgctacctggatgggtgggatgggggatggatgggtgaatgggtaagcaactggagaaaggacttaagggccacagcagagcgcctggggagtggctgggtgggcctgacaggtgcccgctgcgctcccgaccctcctccaccaagcactcactgttgatgttctgccgctggtgctcctcagccttcacggtgcctggcgggctggctgccagaggccgctcaccaccgtcggctgcccggccagcctcgggccctggctcccctccggcactgcggccgaccacggccaggcccccgggtgccagccccagggacggccgcttgtcactgtcacggccatggccggcactgcggaacttcttggtgaaggggcggccgccctggatgtagctgcggtaggcgcccaccttctggggccggtgtttgatccactcgctcagtgtctcgatgggcgagccattgacgcaccactcggtcacgccgaactgccgcaggtgtgcccgtgcgtggctggccagggccttgcggttttcaaagtaaaggccacacagctcgcagcaggcctcggtggctgcggggcggagggggtgctgctgagtcacagcccaaagggggcaggtgcacccagatggccctgcccaggccaggtgccaatcccgcctcccacacagacccagccatgggggccccacttggggtcagtgtgcacgcttgtggcattgcctggcctggcaggccctggcggtcgccctcccaggaccctgccgcccgctgcttacaggagtgggaggtcttctcatgaagggtctttgccttgaagggcagttcagtctggatgtaggtcttggccttgacctctgctgggaggaggcggtcctcctgcaggggccgcttggctgccactgagcccaggtagccagtggctgagggcttggccccagtgatgggcgtcaggctgagctcacgaggaacctgggccggccctgcacctggtttgcctggccggccagccaggggcgacagcggcagtggggactgcacgggcccaggggccacggtgggaggcccgtcctcagccagggcaggggccaggtctccagccggtggctccttcttgatgaggcacggcttggacttcttcttgaggatctctcgcagtgtgtcgatgggcgaaccattgacggaccactcggtcacacccatctgccgcaggtgtgagcgcgcgtgactcgacaggcccttgcggttctcgaagaactcgccgcagaactcacagcggatgtcgcgcaccggctctgcccgggacgctgcaggggatccagggtagggggaaggaggaggaggaggaggaggagggaggaggagggaggaggagggaggaggaggagggaggagggaggaggaggaggaggaggaggaggaggaggaggaggaggaggaggaggaggaggagaaggaggcggcggctgcgggcaggaagcctccaagctcaaagcccccgtatcagtgccagctgcctagctacccctgtccacaccacccaccagaccgcaacaacctgctccctcatctgggcttccagaggcccttttaacatctggctcttctgcttgttctgtcacttcaaattctagctggcttcaagatacctccctgtatgatcctgggcaagtcactttccctctctgagcctgtttcctccgctgcaaaatggagatgaaaacccctacctcccagtgttactttgggacggtctaaaatgggaacagctctcagcatggggcacagagctggtacacaacacacgtgagcgctaaggcacaagcctgggctgccctcacctgctcagcacacagtgggcatccaatcaacctgagcagaatgaacacagtgctggtgtgacaggcaagcgagcaagtgacattacaatgatggcatacagagttttctgtaaccaggtgctgtgctaagtgctttatcccacttaatcctcaagaaaaccagacagagttgggactatgctgatctccatcttccaaatgaggaaacttgcccaaggtcacataaagctagactgtggaggaacagagatcttaactcacacttgactcccaatgtcaagcacttaattaccaaaaatgtcagaaagacacagttcagacgttcactgccagtccctacgctcctgctgtagcagacatcactaatggatccccgcagtctttctccctaggagtctggctggcagccactaccaatcgattgaaatggcacaagagatggaatctttctgctgtcactgaatgacacaatcctgcttctcaaatgaataaaggacaattgagcagcagctcagttgcaggggtctgcatagcaggaatacacagctaaccctgtgtcctctctacctgcgtgtcctcccttccaattcaaccctaggcactctggatacccccaaggggaggcagggaggagacccctccaactgttctccctgccctactgcagggtcacacttacacaggttcaggggtgtcatgtcttcccgtggtgccccccagggaccctcagatgggtgcagttccccatgaagggcccccggcagcatctcccgcttgatctccacccgtatttgttcaggcttcagcttcttgggcaaggagggtgcagccaggcctgggaacatctttcgggccgtaggaggaggagaggcagttggtgagtggcccagggggctgcccggtggtggtggcaacttcttggccaagggtgagatgtgaaggtccgaggggctgcgggcttccagtgagctgccaggacctgcgccgcccatcatcttggccagggcttttgggcttggccctggtgggttgggaggtccaccaggccgagactgggtccgtctcttcaggatctcccgcagcgtgtcgatgggcgagccattgacgtaccactcggtcacgcccatttgccgcagatgggagcgcgcgtggctcgagaggcccttgcggttctcgaagaactcaccacagaactcgcagcggatgtctcgtgctggctctgggcctgaggctgcagcaggaggagaaaggggcagttagcatcgtggaactgccagcatggtcacctgcaggagtgtcctggtcggctgggcgtgggcggcagcagcacgcccacaggttagggtggtgagggcaggtgcaggtaagggagtggaggagcggggctgggggccagatacccggcaggagtgaggggaggctccagagagcacatgggccctcagtcctggcggaggaggatggaaccaagattccattgctctgtgggtcccaacaaggacagggtgaggcagggaggcagcctaggtgctatgtgccatccagacaggggcagatgtgggtgctctgcacactaaaaggcaggatctccccaccttggccttcattctcaggaagggtcatggaggtcaaaggccaagagagagggcctagcagcccactgccaacaagatctctgggcagaaccggcccactgccaagggcccctgtctactccctgccccagcagggagggggctgtgaccccccccccgggaggggctccagggcccgcagtgaggagggggcagctgaagcgagaacctacagaggttgagaggagacggctccacatcagaggcccagaaaatgccggcggctgcggcggccgagaggtcctgcttcccccaggggctggccatacccgcggccttcagcttggccttcttggccggcggtggggggggaagcaaggagagggccgcggaggtgggaggcggccgccccgggtgggccagggcgccgcgcctgggtgggaggcggatctggacgccgtccctcctgatgagcccgtggagcacgtctatgggggatcccttggcgtccggatcgctgacgcccaggtggcgcaggtgggcacgggcgtggctagacaggcccttgcgggtctcaaaccaggcaccgcacagctggcagtccagctctctgcccccgtcactatctaaagctgcggagacaaaacacagggggggttcacggccgccaccttggccggccttgggggcctgaggtaggagggtctggtgtgatttttggctgctcaggcagttggggggtccaagactcaggccgcagatttcttttgaagtttgggaagcaggacatcctgtttcctgcctagccctttggcatcgaggggagtgtagagagcttaaggactttgggtagacaggcagtgaccaaattctaggtaatcagatactcccagaccctctcccctaggatccctgctatgggagctatttgggggcgatggtggctgctgggctcacgcagccaagggcacacctgctcaaggccctgcccctggaagcacggcagactcagtggaagcaacttcaagggaacataaggtgccaaatggggggctccattgggcagggggtgagaccctggggtcacccccagactctaatgtccacaaagatatgggaaagcctgatgttgtaagggacgtccttgttaaacctgctcactgcacctggagggtttcttcccaaaccctgcctgccgtgcccacaggcagcccaggaggtggggcttcaccggcaggcgcagagagctgcctctgcgtggtggacagccaggaagacttgatgacaggaccaatcgtgggcacctcccatcaggtgatcccctgtctatccaagatgcttccaactaccactgagaaagctaggccacaggaaccctggttaccttcaccgcccctacccacaggcccagagaaagccaagagctgcccctcagtggcgagcatgaccctggcaggctcatcagccgcagtgaggctttcaggggaagatcagcaaagtaaagtgggaggcacgatccacatccaaggcggcccaaaaggagatgcagaggcttgaccaatactctggcctggctggcccaggacatgggagctgtagtccccaccgcccccacccaccctgggccctgtccctgggctacagcccaacctgaggtcccgaccctcccagcgccagaacctccctcggctcttgggacccacactcactgaggttcaagggcccctcatcctcagactgaggccactgtgcctttggggaggccggccgggggctcagggacagctgggggctcttgtcctcaggattcttaggggtaggggagcccgccagggccagtggtgtctttttgaggagtggagagctgggcgggtggcccaggcccttggccgagaagccgggaggcgacttgatggctttgttgacagcaggggcatccaagggcttggccaggctgagcaagccgggccggggggccccggcgaccacctccttcagtgagctggacttcttagccaggcctgggggcagcccaaggtgggcgtcaggcagacccttctgcttcacaagctcgtagaggaggtcgatgggtgcgccgctgctttccgactctgccactcccagctgccgcaggtgggagcgcgcgtggctggacaggccctttcgggtctcaaagcaggcaccgcagacctcgcaggtggtcaggctctgggctgaagggcaacacagaggccgggagagcaggctgtgaggcccacggcccagctctcccgcttctcctcccctgagagtcccactcacccaggctccatggaagtgttttgcctccgtcaggccccccaaacctcacaatgaccctaacaacgcagagaatagcttggctgctttgccaataagggttagaaactgagactcagagagggaaaagttgtgcccaagggcacacagcaggagatagagcccttctgtcatccagccagtgggacacctttcacaacctttcaggcctacggggtgccctggcaacaggttcacacaaacgctgacctgacagccacatgcctcactgaactaagttctaaccaccctctgtggctcaactcctgcccgaaacactggtccttgcagtctcctgcaccctcttccacagagcctttatccttgcctatctgcttctctgtctccccgttccccaacttgaatggccctcaagagcaagggccaaattcattttgctcctctcacctccctggagtccaccccagggcccgtcactagtcaataacaaccttaggatcaacagacgaagaaatggtgtcatgcgagagactgcacagctagcaaaggccagattcagcaaatgagctgggtctgagtatgagctctggaccaccacacccactgcttctggatgctgtccctcgccccgtgagggtgcagctcagggccacgcatgcccaggacagtagaagttcaagagagaagacagctgagtgccaaccttggtgcctcaaggtgccagagggaaaactgcgggcaaccttgggccccacattaaccccaaggcacgagagtgctcctgtgagtgtaaccagcctggccagcatcccctgccatgccacctgggccactcacccttgaggtcctgcagctcctgtttgctgccatgaggaacctctgcagccactttgctgctcagccgactggccacctgctccagggccccagggacaggcaggctcttcttagggagcgagggagagcccaagtccatggccaccattgcgttttcctcagaacccaggcctgtgggttggggagacaggctcagcccagacaaatttcaggctgtctatacccagaactaagaagatggccttcttccttatccttgatgtccgctctcactctgcgaagcgactcaccccaggaaagctgaggttccaccataacccccagcaccagtccagtgcagggacactgaggctgccactgacagcagacgccagcagctgcttccacacactacagcatggacaggtctggggtctaatgcaaatctgagcccaaactcccatcccaggggatctcaaagaaaagatctctctgggcagaacttgtgagggggaacgtctgcctgtctcgagggtgagggtgggaggcactcagagagggaattcaacacaacaccagggtcaggaggctggagaggccacacagaggcagggagccagggagccagggacagggaggtggcttcacagcacttgtgaggaatctccaccagacaagacagctggggctgcagagacaatgggggaccaggggtggcctactgatcacaagctgggccctaagtggggtaaggtgtctgcacctacagctatctgacttcggacagaaagagttggaatcacagaactttgtgttaagtttctgagacatctatcaggcccgcagcatccctgggtgaggagtgtgtggcagagggaaccaagggtgaattttcacgtctagttgttcaaaggggcctgggaggccagttgaactccaaatttagagttcagagcaaaggatgaaggaactgtgccaaatggggccttggaggcgttcagtgggatgtaacggggcagggggccatgtaggttctatgctcagtttgagtctcgcagaagcaaagagtaggcgctgaggactggggcaccgaggactttgtcaaagtctccgggtcgggtgggcgcgtctgtcagatggggcagggctgaagtgagtttccgcaccggacggaccggaaccgtggcaagggacgctcccggggctccaaagggggcaagggacatctgtcagacggggcaaaggtctcgaggagcggcggaggagtgtttctgaggcctgggaccctgcgagcggcgacagaaggccctgggcccacacaactaaagggcctgggggaggggggggtcccgcagactggacggaaggcgtcgggggcggcggcaccggcaggcgggattccgaccttcccctccccacaccctcccaagcgcgggctcttaccgggcgcgggagcggacgcgggcccgggccccggctccggctcggccttgggcccgtcccgcggcggcggtggcggtggcggtggtggtggcggcggcggcgggggtgggggcggcggcggcggcgcggggggtgccgcggggcccgggctcggggggctgggcgggggcgcccccgcgggcgcgcgctcccgggcgccccccgcgcgcggccccgccgccgccttgctctccgcttttgtcactcggcactgggcggtggaggcggccatcttggctccggcgcacgcggggcggccgccccaggcgggagcagctgagcgccgagtgccgagtgccgctgccgccgccgccaaacccgctccgccccgcccctcagggcgcgcccaggttggcctgccgagtgccgagcgccgagcgccgagtgccacgagcgaaaccgttcgtctgggccctgagggcggacggctgcagctgctggaagcttgtcgcgcgccctggctagcggatgcacccacgctgggcgcccagcggcctctaaccgccgccccagcccagtccccggacatctctatccctaggatgggaatcttccggcctcactcagacccccttaaacaacgtcaaaactcttaagagccccgacgggcggagctaggacctgccctaggaccctgccccattccctttccggaaagtctccatctccgagtcggggatcctggaaaacacctgatctccaaccacaagaatccctccagtatcatcctgttatccaaccgtcccccgacggtgccgttccgcagacctagggaaccccacaaggccggcaacacatttcaatcaccgcctgcttctctctccgattgtccccagctgttccttgacagttgggtggggctagaatcggaacattgccccgcccccaacctggcacccgccccctcctgcccacttagggagagggggcaggcttctaacgacagccttgcagcgccagtgcccagacctagccctaatgttgcatatccttacttaaggcaaggcttccaagatcttcccaatcactccctaaccgccaaccctctgcctcgcagttattcactgaaagactggtcatagctctccctcccaaggacaaggccagggcagtgccaaacctggctcctctcatccgtaggctgattccttataccccagtgcctcctgcacccctagccatcctcagagccagctctgtctcgcagccacccctgagacactacaagccagacgtgggtgagctgagtgcctggggagcagcctttagcagaagcaagaagcctgaggtcaagtccccactctgccccttcctgaggtgtcacctcaaccagcccctgtcctctctgaacctccaaggagagggggctttgatagccccaccctcccctttgcaggctcatgaatgcccttcaagtgggcttgtgagtgggtctgactgagcccagagtacagatctaggtaggaccccagcagctgcaagtaggaatagtaccgaaggggccgggtgcggtggctaacgcctgtaatcccagcactttgggaggccaagaggggtggatcacttgaggtcaggagtttgagaccagcctggacaacatggtgaaaccccatctctactaaaaatacaaaaaaaattagctgggcatggtggtgggcgcctgtaatcccagctacttgggaggctgaggcaggagaattgctttaacccgggaggcggaggttgcagtgagccaagatcgtgccactgcactccagcttgggcgacagagcaggactccatctttaaaaaaaaaaaaaaaaaaaagggccaggcgtggtggcttacacctgtaatcctagcactttgggaggccgaggcgggcggatcacaaggtcaggagatcgagaccgtgctggctaacacggtgaaaccctgtctctactaaacaaaatacaaaaattagccgggcgtggtggcaggcacctgtagtcccagctactcgggaggctgaggcagaagaatggtgtgaacccaggaggtggagcttgtagtgagccgagatcgtgccactgcactccagcctgggcgacagagcgatactccatctcaagacagagcgagactccatctcaaaaaaaaaaaaaaaaagaaggaatagtatcaaaggaagccccagcctccagcagtcccaggggcgataccccctgttcagacactctccattcctcagagcccaactactttttgtagccaagttctctgccttgtaaaggctcgtgcaaagccaggctgtgcaagactgggcccttcacttgtccactccctttgcagtgcccagtcctgggctccttcaccaaataggacttatggatttccaagccatcctccactagagacaccaccaaacaagctgctcagaagtctagctctacagctgtgtggctgtggcaaagaagatgacctatggtttccttatccttaaaacagggacatggccggtgcggtggctcacacctgtaatcccagcactttgggaggacgaggcaggcggatcacgaggtcaggagatagacaccatcctggctaacatagtgaaacctcgtcactactaaaaattagccaggtgtggtggcacgccctgtaatcccagctactcaggagtctgaggcaggagaatcgcttgaacctgggcagcggaggctgcagtgagccgagatggcaccactgcactccagcctgggcgacagagtgagactctgcctcaaaccaaccaacaaacaaaaaaaaacagaaacacagcaatcttagttgtacagacttacattgaggcataaatgagatttaacacgttaaaatcttagtacaggggccaggcgtgatggctcaggcctctaaatccctgcactttgggaggctgaggcaggaggattgcttgagcccaggagttccagaccagcttgggcaacacagcaagaccccgtctcaaaaaaataaaaaattaaaattaaaaaaccttagtacatagcaagcatttgataatggagtagcatatcaggtctgccggataaagcaaacattggttgaaaatctagactctaggccgggtgcagtggcttacgcctgtaatcccagcactttgggaggccgaagcgggcagatcacttgaggtcaggagtttgaaaccagcctggccaacgtggtgaaaccgtctctactaaaaatacaaaaattagccaggcgtggtggtgcacgcctgtaatcccagctactcagcaggagaatcgctggaacctgggagttggaggttgcagtgactgagatcgcaccactgcattccagcctgggtggcagagtgagacttcatctcagaaaaaatctagcctctaggctgggcacagtagctcacgcctgtaatcccagctctttgggggcctgaggcaggcggatcactggaaggcaggagtttgagaccagcctggccaacatggtgaaaacccatctctactaaaaatacaaaagttagctgggcgtggtgatgagcgcctgtaatcccagctactcaggaggctgaggcaggagaatcacttgaaccccggaggcggaggttgcagtgagccaagattgtgccactgagctccagccggggcaaaagagcgagactccatctcgaaaaaaaagaaaatctagactctagatctgcactatccaataggatccccactagcctggcactagcttcatttcaacttcttaacagccatacatgaccaatggtgtccctgtaagacgtgcagatatctagagaatatttccagccatcatctcagaaagttctatacaacaatgcttctcaagatagaagatgtcattaacagcaaagaatctggggcccagctgcctgggttttaaatccctgtttcaccctttccagctgtgtgacctcaggcaggttaattaaactctgtgcctcagtttcctcatctgtaaagtggaagaaataataacacctgccttataggattgttgtgaggatgtaaatgagttcatgtttgtaaagtgcttagaacgatgcctggctcccagtaaaagctcagtaagcatttgtcaaagtcactggcaggaaagatagtgaaaaactggatccagaaagagacctggcccagatcctgagtgaaacagaaaggacacctaaatagcagggtggttgtaaggaaagtcatcaacatactttgtaaagtgactcaaaatgcttccaggaaagctgagcggctgcccctccagccccgcccctccaatgctctgggcccctgggaaggatggggctccagcacagcccgtcccctccccttaccatctccataggctggcccagggtcctcagcccaggtgggtggaaagggcaccgtgagaggtaagcggggccgacgggaggtcaggaagctgccaggcggacccccaggctctcggcccagggggctggggggctgctcagcagcagaggtggccagcagctcctgcaggatgttgatgggtgagacagtgagctcccagttggtgataccgaagtcacgtaggtgggcccgggcgtggctggagaggccggcccgtgtgtcgaagccagccccgcagaagtcacagcgcatcaggctgaaggtgcctgggtcaaagttggccactgtggagagaggacaggactgcctgaggtggagagggggctactccccagccccaacccctccccatattcagggcttcaccctggactgcctttcttccccgtggctgtcccttttgctcctgcctgctcctcagctctcagctcgtgcatcctcccaccccattccaggaagcctgaccctcccagatacccccttcccacatctggcaacgtcaaggagggacctcttctgcaaaaacccttctccagggccaggtgtggtggctcacgcctgtaatcccagctctttgggaggccaagcgggaagatctcttgagcccaggagtttgacaccagtctgggcaacatagtgagaccccatctctataaaaaaattagctgggcatagtggtgcgtgcctgtagtcccagctacttgggaggctaaggtgggaggattgcttgagcttaggagtttgaggctgcagtgagctataattgccccatggcactccagcctgggcaacagagcaagaccctgtctcttaaaaagagaaagaaagaaaaagaaatgcttctccagttgtggacctgccatcatctatgagagtatttgattaatagccttctcgtgactatttttactcatgatcacgcaagtgctgtaaattaaatatttgttggatgaagaaatggacaaatggatgtaatgccctctgctgggagccttctctgagccctgcaactggagttagggactttgtctcagcttccccagcctcctggttctcccagctttccccgcatctcagccctgctcactcggtgtcgtcactgcctggtttcctggttgtcaccccttgcccccaacccctagtgcgtagacacacacacacacacacgcacacacacacactcaaacaccatactggcacctccccaagtgggctttgtgtctgccaatgtcagaaccacccagggtgctcctgttggaaacagacttctggaatcagagccttgtactgtgggaactgacaaaccttacaggcagccccagggggttctgaagctggccagtgtggggtggagggggtcccaccactcctggactgggccatgaactccaagagtccaagaactgctattctgtccactgctgtgtccccaggtccccagaacagaggggaaccttgctcagtaaatatttgttgaatggaggaatgaatgaaattctctgcctgaggctgactcttctacccacactccttcctccagtggctggaatggccaggggactggggcgtctccacacatccaccgaccaggtggccttcactgtggctctcaagtctctcaggagcagaggccccagtgtccccctgcttggcgctaagggagagaatttagatcaacggtgggttgcccagccatgtgtctcctgggcctttaaaagtgaagctgccctaccttttttcttcttcttctggaaggagaacctgcgctcaatggccttcacctcctcagcggagatgaaatggcgcacattgtagctgacgcccacgcggttcaggtggccccggacgtggttggccaagccgatgccgttgtggaagcgatcggggcagtaggggcatttccgctcctcgtgcttcagtgccatggccggatccccatccaggagtgtgtccagccccagcgggccgcccagcggcgcgtccaggagcaggaagtccagggggtgggcgcctgccagccccagctcctcgggctgcaaccttgggggcaccctggctgccgccatgacctgcggccccagcttcgccacgagcacaatgggtaccatccctcggagctgctgctgctgcccctgggtggcctctactgcctgcagggcctctcggaatgcctgcttcagctccagggccgcctgcgggatgaggctgggggtggctaggggtgaaaagaccccattttcaggggaaaaatccatctcggaggtcagcactacatcctcctcctcctcctcctcctcctcctcttcgctccaagggcgcctccgttcccccagcccttgtgggtggacggtgcttttgtttctcccgagctgtaaggagtagggggtggatgctagtgtggagggaaaggccagccttccgagaggcctctggcccgtgccatgcaggagtggctttgacagcgggaaatctctgatgctcagctgctggcatcctgggccaaaggccaggctggggtcgtatccagcagggttctcccgccacatgggggccaaggacggctcagctttgccaaagtagtccacagcagtgtcagggaagcaggcgtgagcatcctggctagtgcctggctggctggcagggtcttcctcataagcctcgccatcctcctcccagtggggatgggcatgcaccagcctcacgtgctccctgagcaggctctcgctgggcgcggggaaaccacagaagacacaggcgctgaggccaacggcagctccgtagggctgatagaggagggcgctggcctcagggctggggctgccagccccgctgctgcctccaaaaggctctttggtggtctggcctgggggctcacgcatgtgcagcttggcatgctgcacataggccctggatgaattggtgccaaagacacacttagggcactgcagccgtgcctcccggccctcgtctcctggaacttgcttcagcttttggatctcctcaatgatcttctcccgggaggcctgatgcagctgccggtgctgctccagggcagtggggtcagcaaaggcccagccacactccccgcaggccagcggggccaggtccgcagggggctcctggcccggggctcggcggtgctggctcatgtgctccaggaggtgctccttctgcttgaagtagatgctgcactcgatgcatgggaacacggccggctcctcgtcctcgtcctcatctgggctggccaccccttcggccacctcctccagcagctcacacaggtagggcccggtccggatcgggggcagtagcggctgcagccgctccacagaagcctccgagttcactgtccaggtctgtgtggctacctccgaggctgacgtgggtaggccccactcggacggctgggccagcccctccaggtcctccagatcttctctgccacccaccaccgccatgtccagcgtcttcggggtgtcttccactggcacaaacaccctcctgaagggggcgaggggtggcggctgggcaggcaggtccaagtgcagccctgcgtcctggggggatccctgctcgtcctcatcttggagccagtcgaacctggggcggccctgggcatgtttctccaaaagccttggttccccccggtggtgtaagaaccttctagagccctctagctcagcgtggggtttcatggttctcacaatgactgagtcctcgaatctccgctcagataggatgccctccccagcctcctggacaagggggtgctcccagggcccccggccatcaggggtacctgggaaatggcccaggagatggggtggtggggagcccggccggaagtccaggctgcctccatcccagcagctgcaaggaagtgccaatggggacaggttagccatgggctgcagttttccttcctagggtggtgatgggggtcctcccaggccgtttgaagcaggccccggagatccagcccgagggtgacaggggtgtgggggtgagggtgggaggtagggggagtccacgtggatccttccggacctatcgggtcaaaagccaggttcaactcctaggatgcacctgtccacaaagcctagccccgctgcattgtgggggaatgtacggagaccacccctgggccacacggggatgtggccacctctaagaagtctggtggcaacagtcaactctcatctctccccagggaggacccaagcctctcatctgtgctccaggctgcttctgtcttggttctccccaaactggggtgattttgctaatttagtttcacctctcccccagatttggcgattaactttgtggcagaacagttcaaaggaatgttccttttccctgcatctccccctccagaaaggcagagtcaggagaggttgaaggtccctgctaagcctttggccccagtgatcctgaccttcttgggcagaggggtgggagtggggctgggggaggcaaggtaaccactctgggcctcagttttccaatcctgaaattgggggtaattcccaagaactgggaacccctttgtccttatacaacatctgtggagctttctcatagccatcatcaacaaaaggtgcttgcaacacaaggcaggtgcttctttaaatgctcacaaccacaacctttcaatgaccccgcagggtgtagggtgaagatgacacaactcagtgcttgagaaatgctttgtttcacctcatgcctggcccagtgtgggttcttattatgaccatttgagatcggttctcccttccttttcaagatcctgcctccatcaggggatgccaatcacgcttatggaacagatgtggaaatgttccattcagatgttgggtggagaccataaggtcacctttctaagctccatcactgacatgcgatactaaaaggaccatcctcctggggctgtggcaaggattcagtggggataaacacatgttcagagtgtagctcatagcagctattattaattaattaataatattcttgctcattctgagagctattagtaatcctgataaacttactatgacctggccaggcatggtggctcatgcctgtaatcccacctctttgggaggctgaggtgggtggatcacctgagatcaggagttctcgaccagcctgaccaatatggtgaaaccccatctctactaaaaatacaaaaactatctgggcatggtggcaggtgcctataatcccagctactggggaagctgaggcaggagaatcgcttgaacccaggaggtggaggttgcagtgagccaagatcacgccactgcactccagcctgggcgatagagtgagactttctcaaaaaaaaaaaaaaaagatgactatgacttattagcacctgccaagccatttaataaagagtagggaccatcagcattgctcttgattcctgctctcacccaatgccccttggatcctcaaggcgaattcatgagatgcatcttatggactccattttgcagatgagaaaactgaggcccagagaggcctagtatcattctaagggtcacctggcagagagaggacttgaagggtccaacatccaggctcctgcccctctggccctgctcctggcagggataatgagagttgaccctctgtgttcattccagacctcccccaaccccagcacacgcccaggggcttgcctgccgggagctgactcctcctcctgcctggcctcctgattccctcctgtccccttctcattccccaggggcttatctgaggcctgggcatgtcctgcttgcccccctgccctccctgaggtcagggccagcatggcactcaccagctgctgatccgatgggtggcggaggtgacacgggggagggcttcgctgaggccgggatggggctgcccgtctgcaacagagaggggagaccctgaggggctggggtccccctggccggggccctccacaccccagctccaggagccctgccaggtgcctcagaaaggccctgctggctcccagttcctctccctgagaggcccgtggcctctgtggtcctgagccctgaaaggggtttctttggaagagtccccttggctctcctgggggaccccagggccttgctgccttccaaccctcctctctttcccccaacccagcagccagggtggttttttacaagcctcaccctggtaaaaactcacctggcttctcattatacctataataaaaaccagacttctattttttgagacggagtcttgctctgttgcccaggctggagtgcaatggcacaatctcggctcactgcaacctctgcctcctgggttcaagcgattctcctaccttagcctcctgagtagctggaattacaggcgtgtgccaccatgcctgggtaattcttctatgtttagtagtgacggcgtttcgccatgttggccaggctggtctcaaactcttgacctcaagcgatccacccacctcggcctcccaaagtgctaagattacaggtgtgagccactgtgcccggcctaaaaaccagactcttagccgccacctacaaggccctatgaggtcagacctctgctggtctctccaacttcccctctctctcctggcccttcaatgcctccattctgactgtatgggcctcctcaggaagccccaagcccacctaactcttttgggcctcagggcctttgcacctgctatgccttctgcccagggcactcatctctgaccgcctaactcaaatgagcccctatgattttctctctcagcacctgtttcatttctttcttagaactttctgaaatcacctggctctttcttgggatgactgcttgctgggtcccctactagcatgtagtcacagtagaccaggtactttgtcggcttcgttcactgcagcattctagcacctggcatggagcaagtgctcagcaaatccttgccagatgatgaacgaggcacctgttctaacctgagctgcagagagcccatccctgccttctgcaccctctcccaggcctatgtcctgaaatccaatcccctcctgggaccccctccccaccaacacagatggagccaactctctattatccgcctgtggagccaatgcctggagcgaccacaggaatcctggcctgcatctctgcccgccacacttgcctgacgtgggtaagcttgccaatcggggagcaggccaattgcccgggccaaggttaacacactgggggaacttgtgccccgtccagagcccgacagatgcaattgttggattagcctcaatttgaggatggtccagaaaaagggatagggctggggcgaattctttttccaatccctcatcatccaattggcccgagaaattgagagctgactgctgagagtcaagggataaaagtggaggtagggtggggagagggtgttgaccagaaaggtgtggtcactggctgagggtccttcttctgaacccaagaaaagggttgtgactgttgtgtgacctctggaaggggtggtgggggtatggaaatttgcatcatctacagcgcaaggtgtctcaacatcagcaccattggcatttggggccagatcattttctggggtggggtccatcctgtgcattgcagaatggtgagcagcatccttggcctccacacctccccagccctcggtcatgacaaccaaaattgtcaccaaacattaccaaagtgtcccctggagggggaggcgaatcacccccatttgagaaccaccaggatacactgatgggcagcagagctgtgcctgggtgcaagggctggttttaggatgggggtgttggagagggcgttcagagttgggaaagaaaggcctggcccagccaagaaacaggggctctagagaacatgtgagtcatagatttgacttttttcaggagagggcagccggttcacatataacctgccctagcatgacctagaggtgtgggtctgagggtcccgggcatcctgcttttgaggttctaggaccccaagctcccaagattccgggcgtcccagatttgatgattctgcgattgctgttgtctaagaattccaagagccaggggaccgcgtggcctctttgtctgagcaattccagcgaggctcctatttttagtggcagtgactttggaggaagcaggccaagcagtgccctgtgtccaagacaccttgggggtgggggcttcacccagaggcctccacagttgatggggatccaggagtccctacgggtcagatgaggcgctaggtcgcagcccttaggcagtggccatgccaaggggcccttgttggctcctgccatctgggttccccgagagagtttgcaaatgctgatggcaaggggtgtccataagcagcctgaactccaagcctggggttcaacttggtagagtggccaagaacctagattctggagccagacagatccgagttcaataccccaggggtgccctgaagggcgtgcctctcccactccgagccttggtttcttccgctgtgcaatgggaacagccaccgacccagtctcgcagggccagcaatgggtgccagcaagattgtagtaaatgctccatccagagaagtggcggtggaggggaagaaggctggtgggaggcctgggggatcagggctggttcagcgatgtctcaagggggaagcttgaggctagaccccagagcctcaggtccggtcactccatgctctgattttctccccaggctggggcctcaagacagcagaaatgatatgtcatttgtccctgggtgccctgtccccaacacaatgccaggcatgtaccagactcttcatcgatccatacagaccacctcagcccctgagtcttttctgaacctgggaggcccaaccagagaggcaggagctgcagagggggtgtgggagctctgggtaaacagccgtaacgggggacagaggaggcagcgggcacacccctgcccaggcagggaagtttggaggtggccactccagtgtgctcttggggggctctgagggctgagtggggataaaggaaggcccaggctttggggtggaatagcagccccagagcctgttcctatttataggcatcacaagactagtagggcaggtgcccgtgtcccggagggggagatcaagcgggcagagagggcagtgggagagacgtggtgtcccaaacccaggcattcttccaacattcaggccatgacctcactccaagtcaagccattcctatccctgcccccagctgctgagggaaaccttcaagggtgggcctggcccccctcagcagccacatttctctcttccccaagctataaaacagatgcacgtatgagaccctgggtgattccccagtgggagtgaggatgcacctacctgcctgcttttcccctctccccagacctggggcatctgcgaggtagagaagagatgtccaatccctcggaaccagacccagagaggaccctgggatccctagagcctgtaccctcaggctcccacaaaatcaaagtccccgcccagccctggccggctgtgcgacctggcacaagattctgcctctctctgagcctcagttattaactcagttattaatggcttagaggaggggattgctaaagtttccctgagtgctgatactctggagttgggtgtaccctctgccctcaggggtctcaccttgccaccccactgcctgacacctgcagatgccaccagctacctctaagccttggcatgtacacagccccctgcctagatgcttgcttcccccttggtctggctcattgtccctcatcctacctctcacttcctgcaggaactcctggttgctccccaccaggtgctttcctcatcacagccccagccgctgtgtcataacacctggtgacataacaccgggtcataacacggtatcataacatctgtctccccagcctcagatggtggggtctatgagagcgaggatggtgtgtgctcagtcaccgctgtgccccagggcgtggcccctagaagatgctgtgtatttataaatatccgagcatcatgagttgtaaaggtggccagagcaggtcaaggatctgtgaggatgcagcagggtggttaagagtgagggctgtcaagccatgttactccctggctaggtgacgttgggcaacttatgtcaccgctcagggtctcagtttccccatctctgacacgggataataataatgaaggctattccacagggttctttggagaatgacagaagatgatcttgcaaaagccttggcacggaggaagcccttgatgaggtgtttggagatgggggtggggggtgtgatacatcagcccactgttttccaggcataccagcctcctaccaggtccttggacacgtcaggctcctccccaccacagggcctttgcactggctgttccctccacccagaatgcccgtcccaccattcactccatgctccattcaaatgccactctatcagggagggtctcccaggtctcccaggcatgatcctggcactctgtttaatgccttcacagcatctgtcactacctgtccttctgatatttgtttagttgcttgttgtccatttcccctactagagtgtcagccccttgagggcaggaattcttgcctctttggtttacagctgtcttcccagtgcctagcacataccctggcacaccgaaggtgctcagtatttaatgaatgaataacacgtctggaggtggggagagtgtgagatacctttttgctgggtaaaccaaggggtagccagcatcgctgactacccagcctctccctagccactacagaagctgttttggcccgtggttcaggaacaggatacacccagacagccagagggagctgggatagactgatgggagtggggaatacctgtggaataagtgggctgggggcagggagtctggggtgctgagatgggcctctggacccaattagtatgctcagaggaggaagccaggctgacctgagttcaagtcccagctccataccacccagtggggagccttggtctggtcactggctcccaggacacctgttttcacaactgtcaaataagaaactaaacagagtacaaagaaaaggctctggacccaagcggaatcagcatcccagctcagccgctgctgcgctgggtgacttgactctctctgagccttggggaatgggctggatgctccctgggggccacacggcccattctcttaccagagatgccacctctgccatccagaatgtctcgggggccctccttggtgacaggcaggtaacgggtggaccggaagatgccaccttccccctcagcagcttcggccccaccctcgatgttctcccttggcgccgggccaggcagtctctctgggccttggggacgatctggtgcagccaggctgcctgccagagacccctccatcggattttctctgcttggatccactcagctgctgcaccggctcagcggggcattgtgggcctggggatagagagaaggaagtgcttaggggatggaggaaagggaatctgcctcagtttcccatccctcaaaacctcagtcctcaactttgcagctcactgcctcagtttacctcccagcccaggggagctaatggtgttcagaccttttccacacaccttctatcccaatggcccctaccctcagcatgcctccgtctccccatcaataactcctcccctttatacagatcctgcactgcctcagtttacccatattgacacatgcacactcagccacctggtcttcttccatcaatcttaccatttctccagacgcctcccttcattcacacacagctgcactttccccagtcctgccctcacatccatgcacacgcacatcctactgccatgccttcgtttcctcggcaagaatcccagccacttgtacactctgatcctatacaccgtcaggagtctcccatcattacccctttacttttctccattgggttgtcccataccaatgatccctgcacttttcccacactccaacccttcccccacacaggaccttagggttctccagcattaaccccttcacccccctccacacacacagcctcaagtgaccccagcattaaccctttcgcttctccccaacattatccctcatgcatacccagcttgggctcctccattccccccaccccccaaccaagattgctctagtcctcgggcgaaagaaaacgatagggctcctggtccagaaatgaggaccctggggagcgggggttgtcctctctacctataaataccttcaaggtaacggcggaaagtgaagggcaggaatgaggcgccctccccagggagatggtggggaggccgggcccaggcaaccggggcggggccggggcgccaggcctggttgcaggcgctgccctcgggggcctggggattcccagggggctcctccgtgggctggcagtcttggtgggggtccctacccaggcccggaggaagcacctgcggttgtccactgggtgggcactgcccgcggggaacgggcgggaccgcaacttcggagcactttggcagcgtggggagggggctcctacccggacgccccccaggggtcgcagaggtgggggctgcgccgcgcgggcccactcctcgggggtccagggtccgggggatgagccctccgcccgtgcaccccggggcaggagaccccgcgggacgcgccgaggtaggggggacacctgccccaagacccccgcccctccccccacctgcacggccccgcccccggccaggccccgcccctgaaggccccgcccccgcccccgccccggggggtcccgcctggcccggcccggcccggggcctcccccgccccgctacggctccgccccacccgcgggctccccaggccgggccgggcctcaccggggaggcggcgccgccggccaggtgccggggctcggagctcccctccttggtgcggccgtcgctgccgctaccgccgctgccgctcccggtgccggtgccgcggcctccgcagccgccgccgcctccaccgctcgggggacattgtccctttaaatcgctccccccgccgccccgcccccccggcgcgccgccgtgacctcagcgcgacagccccgccgcgccgccatgatggggaggtccggggcgccccccccaccccacccccccccccctcgccgccccggggggggcggccagcgggcgcgccgccatgttgggagtggccaagcgggtcacccttaaagggcccgcacggcctgagtccagggagaggccccgttaccatgacaacacccttgtcgtcccacaccccaatggctccttatcgtcccactggtacttccaatggtaggctcgctaaaagcactaaaagagtggggagggtgcagagaagttcccccatgggtcattgatgggtcattgataggtcattgaagactccacccagccaatttttagccttttgtcccctgccccccatcagctaccttccaaccacaagctcactccctccttcccaatcatccacactggacttcagcacctccatgtccctagagttgccctaggtcttcagtcctaagtcaccttctccacccagttcccaggatcacagcttccaggactaccccatcagacacacatcatggcctgttgtcttgtcttatccaccatgtatccagatatctaaccacctagctatctcatccacttcctcaatctatcaatcactcatctacctatccaatgaactaatcacctatccacccacccctccaaccacctattaattcacccaaacacccactcaacccacccattcacttcccatctacccacccattcatccagcacccaagtaaatactcatttatccatacaaccaagcaagtacccaaccatccccacacacatctttccgcccagccccccaaacatccatccaccagtttgtctgttgatttggtccctccactaacatgtaagttccatgaggccaggagtcctgtctagttcattattgtttctccactgcccagttctcaggcgtctcaggagacctcaacatatgtacatatgatatatataatcacaacattgaaaaaaattttttcttactatgaaccaggccttttctaggcagacatacccaacctggttaaccaactacccagctactcacctaccaggtcaaacatccagcaaatgctaacctatccgtctgccgtttgctccacccactctacccctcacccatccactcacccatgatttgaatgactcatttacccaatcattcatacacagtatccaaccatctccacacctgacccccttcctttatccgcctcccagacccatggcctccgtgacatgaggagggcctaggaagatgctctcactgtgggattgggaggttgccaggggtggaatccatgcttcattgagaagcaggtgctgcctataacaatggtgaataccttttatcgaatgcctttaactatgggtcctctcactgtgtagggaactttacgtccatttcacagataagaaaacgggctcttaagagaatgaaggtctaaggtcacacagctggtgagaacttgtgtacatggccctctccatgagacttctaattaggggagaatttgggagagatgaatagggcttgcggggcaaatgcctaagaattggcaattcttagtgggcaaagaaaccaccaatttcactgaaatcaagattttactgggcaacttcatactgccagagtggttgggaccagcagctccactccccactgtaggccaagtagggctaaggcaaagtcagacaccccccctaagatggctatctctctgctcccagaccacgtgtgatgaggcaggatgggcagctcaggtggtgtctccattgaggcagggtgctttgaggggctggggttgactccaagacccccgcgtccttggagaaagctgcaggctctggacagcatccctcagctgagcctgagttctctccatctcatttaggcggtgctcctggggaggcagtggtgatggggttcagaaaccaggagagggctgcaccgcaacccttgctcctccaccgcccagacctgccccagggctcagatggcaatctcaccaggtttttcagactgtgcccttcattgcttgttaggttgtgctctgaatcaaactctgagctcctgtgggggtcgggggattggggcgaagggcagaggctaaggaagtcccttccagctcctggtgggagtgccagggactccgggggcggagcttggagtggaggcggagcttgtccagactgaggggcggggcctaaatatgcttgaagaagggtcggaccagagacgggaatggttggaatgacaggacctatcaatcatcccttggaggtggggtttggccagtcctgggtggggtcgtgactgagctggagggagtgcccaggctgagatatctcagtgcccggcccagccaggttgggaggggctgatggaggggtggggcctggatgagagaatctgccagggtcctaggccgaccttcgttgggtgggtccacctgggggcggggcttgccaagaggcagggcctggacagacttattggggcggggccagggtggggcttggccgtgctaggcgtggtttgggggggggggggagggcctggtcagatctaattggatcgggcccacctgggggcggagctaatggagagggctgggctcacccagcacggagcctggagtccagatcctgcagctggccccgcagctgctcctgctgctccgtcaaggcccggatttgggtgctcagcgactccacgaggcgggacagcactttctgctcctcacgcagagcggccacctcgcactgcagctctgccaactgtggtgggagagcagctgtaatctgacccgttgtcccgcccctgtgtctccccggagaccctgacctcccaggcccaagcgctcagcgtcatcaccggcctgcctagttggggaacatccctcctgcggtacagctggggagactgaagctcagagagggtcgggctaggcctggggtcacacagcacagcgagctgggtacttgaacccagacttgcctggcccttcagtcttccccagtcgcgtccctgttcccactccccaggcgcggacctgggcctgaccttaccttgttcacaggtcggtgcgtgcccagtgcctggtttcggtcttgcggctggtccatttggcgctgccagggtaccgacggcttccgaggcagcgaggcggagtcccgggtccaaggccgggcgcggggcgctggtcccatgctcagggagcctttgggtcgcggccagggccccgcagattggcggcggcgggcaggacgccggaccgggacactctgcgtgcgctgcaccggccggggccgccgcaggggccgctcttcgtccggccgtggccgggcccaactctctgagcggcgaacgctgcgcagagactggctcttggagatgagaggggtgtgcttggggaggtcccggggggccaggaagccgggcttctcccctgcggagaggctaggggtgggatggaggatcttagaccctccactggcccctgagacgaccccatcccgacctgaccagaagtgacctcaccccccacgtgaacttgtcctttcttttttttttttgagacaaggtcttgctctgtcgcccaggctggagtgcagtggctagatcatagctcactgcagccttgaattctggagctcaagctattccccagcctcagcctcccaaatatctaggactaccagcacatgccactatacccaggtaattttttttttttttggtagagatggggtctccctatgttgcccaggcttgtcttaagttcctggcctcaagtgatcctcctgcctcagcctcccaaagtgctgggattacaggcatgagccactgagcctggctcctgtccttgacttctgactataatactgtcctctctatgacccttgacatctctccaccctaacctctcctctcatccccgacctcaaacacactgtgacctttgacccaaccctttctataacctgtgattcccgtctgaccctgggcttgacctctgctcacaatgatccaacttcacctctgacccctgtctgagccctgctccttcctgttcccacccatcagaccccagaccagacttgaggttacctggagtggacctgggccgggggcagtgggagacgcattggcactgacacaagcacaggctggccctcctcaatggctcgcaggatggtgggcagtggttccagggtgtctcgggttgtctggtgaggcatgcaggacagagactgagcaaagtctccagggtcagagtctcccaagccttcttgcctccctactctgggttcaggccatacctggtcaagctcagcaaaaattgtacagagctgggcatgcaggacagctaactggagggccagatcaccactgccctggtaaccactgggggcagcatccacatccaccatggctacctggtccaggaagcattgcatggctggtccatgttcctccaggaagctattcatgaagcccatgtaggcctccttctcaccgaacctggatcagggccaggctgggtgggtcaggtcaggcacctgccacccccacactcccagcatggtccccccacccctagcttcccagcacctacggggcacggttggcgaggttctggatgaccttggcaatcagtgtgagggtgcgggctgggccgggtgctggatggtctggtgccaaaccaaagaggctgggtgccaggatggcagggcacaggagccgcaggaagagggaggcgcacaccagtcgggggcccagcacctcagagccacgttctttacatgcttctcgccagcttgagaacacgatgcccagctccgcagggaaccagctggtgcagaagaggcaatgaatggtcagacggggaggctatgggcataaaggttaaagtcataaggttgggagtcccagaagcactgcatgattggtccatgatcctccagagagctattcatgaagcccatgcaggcttccttctcactgaacctggggtctgggctctaggattgggaatatctgagataacaatgcttggggttatgaatcagcatggggccatggcttatggtgtagctatggcaatcgctggggataatactcttatagttggggatacagggtcacatgaagacagaggttatgagcttggatgtacttataattagacatgagactggtgggccagagtacaagatataaagtaggattggggctctggaggtcacctagggtcagaagtcacttgattgaagtcagggattaggtatgcaggttaacctagggtcagaggtcaagggattggaatcccaggtctcctgtgatcagttgcatgggatttgaggtggagggtcacttaaagccagggatcatggacttggggcatcatctggtcataggattgaggtcctatgttaactggagccagtggcatgaaattggggatatggaatcaactgtggttacaggacaaggaattgggtctcaggttacttggggtcagtggtgatagggttgcatggtgatagggttgccagatgcagcaaacgaaacttcaggacatccagttaaacatgaatttcagataacggagtgatttttatttatatttttacttttatttgggacagggtctctgtcaaccaggctggggtgctgtggcatgatcatagctcactgcagccttgaatcctgcgctcaagcgatcctccagcctcggctgggaatacaggtgtgtgccaccatgcctagctcatttttaaaaagctttttggagagatggagtcttgctatgttgcccagactggccttgaactcctgggctcaagcaatcctcttgtctcggcctcctaaagcattgggattacgggcgtgagtcaccatgcctggttcaaatgagtaattttttagtataagcatggtcccaattattgcatcaaatttaactgagtgtctcctgtattttatctggccaccctaaactggaggtcggggctagcatggtaagcaggggtgggctaagctgctggggccctgattctcactcgtaggaatggataatggtttcgaagacctcctcgcagctgttccgaagtctggcctggtgctctggcagctccgaggctggacatttgctggggtccacttcacagtcctcagtagaagcacagagacgccgcacaacctgtcctgcagcccagcacagccagataggggctggggccatgaccaccaaaacctgccacacccatcctccaaccttgtcttcaggttattccggaggcacccaacatcttggggagctcccaattgtccccaggatcctagcacccccaaaacaccactcactaccagaatccaggttgctcaaggactcttagaacttcacccaggtcccctagctcaccagcaggccgctgacatggactctcccccagctcacccagggtctcctggaggtaatcctgtgccacgagcttcatgtactcatcgatagccttggtggccaatgtgttttcccggaacagcagcgcctcacggcctccacagcgcgccagctccgcagtgcccaggtcagtcaccagcgcctaggaagggcaggaggtcaggttgcaccagatgcagacagagtccaagggaattcggatccttggctggtccctcacaccagaggcacaggccccgccccttgtagctgatgcttaggcccagtccttactgctggggctcataaccgaggccggaacctctaaccctcacagcagaaatttaagcctttcagcgctgaggtgcaacctgggccccgcccctcacgcgtgatgctcaggcccctgtcgcagctgaagcttaggctccgctcttcaaggtgtcccgccccttatgggtgataattaggccccgcccctcacagctgaagctcaggcccagtccttcaaggtgccccgccccttacaggtgcagctcagccccagcccctcacagctgacgctcaggtcccgcccttcaaggtgccccgccccttacgggtgatgttcaggccccgcccttctaggtgccccgcccttctaggtgccccgccgcttacaggtgacacttggaccacgcccctcacaccccttcaaggtgtctcccccattacaggtgcaactcaggtcctgcgccccaactcctgcccgaagcgcgttatcggtctacccctggtagccccggtccgcgctgtcgcggtgccgcacctgcgcccggccggtggcccgcagcacgcgcaccatggctgccgccagctcctccttggcctgcgcaggcagcgcgggctccagggccccgcagaggcgcgcatagtggaaggtgaggaactccgccagctccttgtagcgctcggacggcagcacgcgcaggcgacgcgcccgaatccgcgcccgcagcgctgcgcccgccggcgccccgagcagcgggaaccagcgctccagaccggcggcaggcgcgcgtggggcgtccagctcctccagcgccagggccacgcggcccagcaccgcgcttcccgggcccaagccgcgcagccgcagcgacaggcgacgtgccggtggcagcgcctcgaagtggaagcgctcggcccagaagagctggcctgggccggcccgaggcgccgtgcgtgccagcagcgcgccatccagccacagctcggcgcgcacgccgggtgcccccgccgctgctcggggaagccccttcgcttcgtgcacccacacgctcagccatgtctcttcccgctccacgttgtcctgcagatgggagtgggatggggggaagcgttttggtttgttggcaccccaaagaaggcaccgcaagtgaagcgtggagcctcaaacctgttgcgtcgggtccctagggagattgctgggcctttggggaaagaagtggagccacgggagtccggaggcggttacgcggaagtcttctagcttttctgggctctccgggagagttgggggctccagggcatacaagagtagtactggagtaaagacttcgcgattgcctggcaggcagggctttgggtgcatatggggccgggagtggacagaaggggcgggtctgatattcccggggctggtaatagatggaaggggagtcttggagccgttgcaacgatgcaggcggggcaggtgtgttgggggcgcgggttatggagcgagctggctttgggtagagtggaaggggcgggccaggcctgtgggcggggtctccgtgtcccgcttttctgagggcaatgacctgggtgggctggaattggcgacgaaggtcctcgatccagcggtctctctcagcggccgagcgacaagagaagcagcggcttccacccgtccaggttacctgttgggatggagaatccaacggtgtgatcgaggccaagggtgaagccaaagggtgggaggtgggactgaggtggaatcgaggtggactgtctacacttacctgaaagcagtggggctcccccaggaggctggggtgcagtggccagatccgcacatcccgctcggcacccaggtccagttcagagagtgtggccagcgactccctagagcccagagcactggggggtctgggaagggggtgggtgagcacaccgtcattcctgcctcttccccatcccccatagcctgaagggtagaggaaggccaggaaggacttcaacccaattcggatcccgtttctcccccgtgccccccccaccccccgccatggcacctccttgcttttaggataaactcaactcctggtgacctacatgaccaagctgggtccagatgttgtcacctcatctccctccacctaatccatcactttctgagctccagcctccctggccttgttttattttatcctatttatttatttatttatttatttgagacagagtcttgtttagtgcggtggctggatctcagctcactgcaacctctgccttccaggttcaagtgattttccttcctcagcctcccaagtagctgggatcacaggtgcccaccaccatgcctggctaattttctaatttttatatttttagtagaggtggggtttcaccatgttggccaggctggtcttgaactcctgatcccaagtgatccacccgcctcagcctcaccaaagtgtgggattacaggtgtgagccaccgtgcccagccctatttatttatttatttatttattgagatggagtcttgcccttttgcccaggcaggagtgcagtggcacaatcttggctcactgcaatgtccacctcccaggtttaagcgattcttctgcctcagcctcctgagtaactgggattacaggcattcgccaccatgcctggctaattttgtattttaagtagagatgggatttcaccacgttggccaggctggtcttgaactcctgacctcaaatgttccacctgcctctgcctcccaaactgtgggattacaggtgtgagccaccgcacccagccctatttatttttgagacacaatcttgctctgttgcccaggctggagtgcagtggcatgatctctgtgcactgcagcctcaacttcccaggctcaagcaatcctcccactcagcctccccagtaggtgggactacaggtgcccgccaccatgcctagctaatttttgtattttttgtagaaatggggtctcactatgttgcccaggctggtctcgaactcctagactcaagcagtctgcccactttggcctcccaaagtgctgggagccacttcacccagccctcttggccttgttttagttgcttctttcggcctcttggcctttgcacttgttgttccttctgcctggaatgctttttccacccccctgttggcctagttaacttccatccacccttcagatctcagctcaagggtaccttccctaaccctcccagaccagttgattgacttagctcccattttagagttattgtgtcagactttgcccccaccctggctctgtgctagatcattcaatgtccccagcatcaactgatgtggggcagaacacagaggccacagggggtgtttggtgtagattggaatgatatgcaggaggtggaggaggaggggccagtgttgaaccccagcccctccagcctctcatacacccttacccatcccggggctccaacctggcctttttcttctctttcagcctcttgagcaacccctgtggggaagggaatgtcagctggacagaaatctgtgctccttcctcagctccttccctcccaagacatcccagaggatctactggtcttggaggaccaacaccaagctcaggctgtattagcaggaataataagagcaatcagcagctcctaattctttgttcatttgtttttttaagacagggtctcgtgctgtcgcccaggctggagtacagtggtgcgatcatggctcactgcagcctcaaatttctgggctcaagtgatcctcttgcctcagctgggactacaggtgaatgttaccatgtagaattggggacttgctatgttgcccaggctggtcttgaactcctggtctcaagcaatccttctgcttcagcctcccaaaatgttgggattacaggtgtgaaccactgtgcctggcccaaactcccatttgtaaagcatcaatcatatattctcctatactattcatttatttatttaagagatgaagtctccccatgttgcttaggctggtgttgaactcctggcctcaagcagtgctctctgctcagcctcccgagtagcttggactatagctgcgcactgccctgcctggctcctgcactctctattggcttcccataaacaacccctagagaaaggttatttcattagcttcatttgacagactgggactctgaggcccaaagagggtcagcaacctgctccagatcacccagcaagagtgccctttcagctttgagggtccgagagtcttggctctcccctctacctcccaccttcactggctgccttacccgaacgttgtggacctggttgggaccagcagtctccggttctgtttttccaggcatccgatctgtgggtcgttatgggtggcaggttggggggttggattctgccccacttttagagcctcccaaatgccccaggcctttccacccctcaagcttacctggatccctgaagttccccatggccacgtggatgctgccctcggagctagcacttcccacccggggccttcgaggaccctgttctcccgcaggagtgggtagtcagagaggggaggcaggcaggcaggcaggcaggcagaccgagggagaggcagacaccttcccattatcctccctccagcccctgcctctgttctgccctcctcctttttctttcttccctcctcccctttcccaggtgccccctctcacctcctcctctcctccaagcagcaccagcttcccatcaagcagggtgaagcccccaatgtcccagacaggcacgttgggtgtgggggcctcagggatctgtggggtagggggctccagctctggctccggctccagctctgggaagaagaggaggcactgggggacttaagagacgttttctctccctcaggctaccctttccattcccgaaggctcatggtgggttccctcctaggtgccccccaccccagcagccgtatcagactgtatgaccttgggcaagctttcatcgctgtctgggccttgtccccactaaccatgggtagcagacacaactcacctaccatgtgcccagtaccctgtataccactccacacaccttcttgcattgaatcctccaaaagccattcaaagggctatgataacaggctcagagaggttgagtgacttgctcagggtcacacagtttgtgagtggttgggctgggcttcagtcacaagcattcttctctctctctctttttttgtttttttgttttttttgcattcttctcttaaccaagacattatgtgggtccaagaggttaaaaaacaggacaggggctgggcaaggtggctcatgcctgtaatcccaacatttgggaggccgaggtggggcagattgcttgagaccaggagtttgagaccagcctgggcaacataacaagaccctgtctttaaaaaatagcctgatgtgcctgggctctgtggctcacacctgtaatcctagcactttgggaggcctaggcgggtggatcatctgaggctgggagttcaaaaccagcctgaccaacatggagaaaccccgtctctactaaaaatacaaaattagccaggcgtggtggcacatgcctgtaatcccagttactcaggaggctgaggcaggagaatctcttgaacttgggaggcagaggttgcagtgagctgagattccgccactgcactccagcctgggcaaggaagtgagactgtgtctcaaaacaaaaacaaaaacaaaaacaaaatgggaatataagcagtgagaattaaatgagcttccaggaaataggagggctgaattagccctcccagattgcctgtctgttcccttgtttttaccaccaggagcaataaatgataactcccgcttattaacggatcacttaaaatatgttgggcctggggccgggcgcggtggctcacgcctgtaatcccagcactttgggaggctgaggcgggcggatcatgaggtcaggagatcgagaccattctggttaacacagtgaaaccctgtctctactagaaatacaacaattagctgggcatggtggcgggttcctgtagtcccagctgctcaggaggctgaggcaggagaatggcgtgaacccaggaggcggagcttgcggtgagccgagatcgcgccactgcactccagcctgggcaacagagcgagactccatctcaaaaaaaaaataaaaaaaatgctgggccctaggctagtgttacattcctgagccctaattcttgtgatatccattactcttctagatccccctgtgtgacacttagcaccatctgtcattttttttctttcttttttttttttttcttccattgagatggagtctccctctgtcgcccaggcgggagtgcagtagtgcaatctcagctcactgcaacctccacctcccgggttcaagcgattatcctgcctcagcctcctgagtagctgggagtacaggtatgtgccaccatgcctagatacttttttttttttgtatttttagtagaaacagggttttgccatgttggccaggctggtctcgaactcctgagctcaggtgatccacccaccttggcctcccaaagtgctgggattacaggtgtgagccatcatgcctggcccatctgtcattttcttgttgatggatttcctgtcaattccactacactgtgagctccatggggcagggagggtcatctgtctctttcactagtgtgtcctcagtgcctaaatcagggcctggcacatacaatagaagctcaacaaacctctgcttgaataaatgaatgaatatgagcaaataaaattatatactctccaaaatggagatcattattctcactgaactgatggagaggctgaggcttaagggctcagaacaaagacacggaagctagaaggtaggagagtaggaggcaggctgaagatggatatccaggtaggaaaggatgggcctgagccattgaaggagagacccgttggggccaagagccgtttagcctctggacaatactatcacgggtttacattcactgttccttcctcagatggaccctctgcccacaggaccccggcaactcctcctaccctctttagggggaaagagggaacagggtagctgggccccagcggcttcctgctgggcttttgcactccccacaacttcctgtgtctgtatggttgatgctccggaggcagacaaaacccaagcatccggcttcccagcccggcccaagctcagggtgggggaaccatgtacctggggcctcctgctccggctccgggtctggctccggcggtgggttcttatgcctcccccagagggccttggagagtcgaaggcgactggtccgtgactccttgggaggcgcagataggacccgacggaatatcgagcgaggggctggctgggtgctgaccatgggctcctggtggctcagggccctgccccagccagcaaagcggccccagcggaaccctccagccgccttctccccaccgccccctgtgtgccagcggtaggaagtcagcggagaggtggctgtgggctgggtttgggaggtccggcttggcgacggtgggtccatggttgggggggggggtctcctgggggacgagagagtgacagtagtgcccagtgtctgtccacatactgccctcatctcggccccctccccaccctcagctctgcctccaggaatccccctgcccccacctccactccctcccttaccttggtttcctgaccagccccagaatcagcagccgtctgcaccccgcctggcttcctccctcggaacccaactccacgtgaccctctctgtcccaccccaccccacagccaggctgggagggcacagtgcgggcaggttgctggaggttcgagggaggagaagagaggaggtgggttaccaggcttctagcaagaaggacccagactgcctccctgacggggaggcagcacttgcccctctctctgagcctccgttgccttctctgcaaaatgagtacaggctgaacaaatgctggcgagaatacaaagcacctagaactctaatccacagttggccggagtgtagacccattcactcatgttgggaaacggtttggcaggatctactaacactactagctggatcttctctgactcagcaattccattgctaggtagacgtccaatagatatgcccccccagcacaatgcataatagccccacattggaagcagcctaagtacccattagtgggagaaggaataaattgtgatctcttcgcacagcagaatatcatacagcagtgagaacaaactaaagaatgatttaacttgggtgaatcacaaacaatgttgagccaaaaccaaaaccaaagccataaaatgccagtaatctgagctattcaggaggctgagggaggaggatcgcttgaggccaggagttcgaggctgcagtgagctgtgatcatgcctgtgaataggcagtgcactccagtctgggtgacatagggagacctcatatctaacttttttttttctttttcccctccctgccctcgggagaccccatctctaaaaagcaataataaataaatttaaaaaccccaaaacaatgaagagtatacactttgtgattccatttacataaagtcctaaagcaggcaaaaccatgtctaacaagcagggtatcagtttcttttggaggcactggtggctgggaagagggtacaaggggggcttctggaagatggcaagatttattattactcttattattattaattgatttatttatcgagaaggagtttcgctctgtctcccaggctggtgtgcagtggcacgatcttggctcactgcaatctctgcctcccggattcaagtgattctccctactcagcctcctgagtagctgggactacaggtattcaccaccatgcctgcctaatttttttgtatttttagtagagacggggtttcaccatgttggtcaggctggtcttgaactcctgacctgaaatgatctgcccgccttggcctcccaaagtgctggtattataggcgtaagccaccgtgcccggcccttattattattattatttataaatgaggtctataaaaataatatagatctcataaaataaaaatataatatttatattacatagtaatataaataatattacattatacataatatgaatattattattttttgtagatgaggtctgtcatccaggctggagtgcagtggtgccatcatagctctctgtaacctctaactcctgggctcaagagatcctctcgccttagcctcctgagtagctgggactacagctgcatgccaccacacctggcttattaaaaacaatttttttgttgttgttgagatgagggtcttgctttgttgcccaggctgttcttgaactcctggcctcaagtgatcctcccacctcagccccctaagtagctgggataataggcacatgctaccatgcctggcctattttttttttaattgaggtaaaattcatataacacaaatttagcatgttcttttttttttaataagatttttttttgagacagggtcttgctctgttggccaagctggagtgcagtggcacaatcacagctcactgcattctcaacctcctgggctcaagcgatcctcctacctcaggctctcgagtagctgggactacaggtgcatgctacctgactaatttttaactttttgtttgtttgttttttgtagagatggggcctcactatgttgcccatgcttgtcttgaactcctgggctcaagcaatcctcatgcctcagcctcccaaagtgctgggaatacaggaatagcatcagcctctgtgcccagagagacgaagccttgttctgtcacccaggcaggagtacagtggctattcccaggcatgattgtgggtcactgcaaccttgaattcctgggctcaggcaatcctcctgcctcagcctcctgagtagctgggactgcaggtgcatgccaccatgcctggctaattttaatttttttttttttgtaaagagacagggtctcactatgttgcccaggctggtctcctactcctgggctcaggcagtcctcctgcttcagcctctgtagtggctgggactgcagatgtgtgccaccacgcttggcttaacatgttctatttcttgagctgggtcctggttacatggctgtgtgctgttgtgaaaattcatcaagctgtgcccttgggagcactttcttgtatctctgttaggcttccacagatgtttacttgaaagccagaggtaagtaaatgccattctgaggaataaatgagtcagcataaatccggtccaggagccgagtaccagctggcccctctccctctgtgtgacctcagacaagtcatttcctctctctgagcctcgttttccttatttgtacaagacgataatatcagtttcaaaagattcatgtaagcctttgtctagtcaacaaatgtttcccgagtgcctattacatgctaggtgctggagaggccgcagagaactaaccaaacttggtttctgccttcctggagctcacagatgatggaggtagataagatcctaaactcatacatgagacatttctagctggtaaggaggacctagaaggaaataggctgcagtgaatgctgagcaaaaatgccactctttgagctggaaaaatcagggaggacttccctgaggaggtgacatttgcagccatttgtatctagcagatggagtccactatgtctgtgtaacaagcattccaaaagtgccagtgaattaacatgtccctgagagcagccctcacataataactggtgggaattagtgtataaataccccagctccctcaacccttgtgtgggatgactcaggtatgtgtcctatgctctccctcagggcttcgaagtgagactgagctctcttgcctacagtggaaacttgcttgaaaacacattattccctggctgcctccagttccctgcatcggtacctgggttgttcacctctctattttttctttttctttttttttttttccttccttccttccttccttccttccttccttccttccttccttccttccttcctcccttcctccctttctcccttctttcctctttctttcgttctttctttcttcctttctttctttttttttctttgagacaagctctcactctcttctccaggctgctgtacagtgacgcaatcatggttcactgcagcctcgacctcccagcccaagcaatcctcccacctcagcctccggagtagctgggactgcaggcacacaacattgtacctggataattttttctttttttgagacagggtcttgctctgtctcccaggctggagtgcagtggtgtgatttcagctcacggcaacctctgcctcctaggcccaagtgatcctcctacctcaagtgtgtggcaccactcctggctaattttttgtatttttgttagagacggggttttgtcatgttggccaggctggtcttgaactcctgagctcaggcgatccaccctcctcagcatcccaaaatgctgggattacaggcatgagccaccgtgcctggctatgcctggataatttgaaaatttttttttgcagagatgagatttcactctattgcccaggttgttttcgaactcctgagctcaggtgatcccctcgcctcagcctcccaaagtgctgggattacagatgtgagctgccgtgccctgccctgggatctcctctcaataaactacttgtactggaattattgtcttaaggtctgcttttgggaagacccaaactaagacaatgcatgatgatgcatgaacagagactttgtttccatgctgtctttattggaggtctgtggctggcagggtccttgggggtggctccctcctggatctcttagagacactcctggcaggtcttggcttaacagtctggaaaaagacaagggagtgtgaggcttgggggtggttgtggtatgtggctgggtctgccctcctggtggtggaaccctggatcagggaggggacagtggcccaaagtgagagagtgaggacaaagccaactataggccgagatggatgtgctagtcaatagcttaatgaaatggagtggcagtatgtaggtagcacgagattgtccaggtgtgattctaaaattgttttagtgatggcgatcaagggctgggatgaggtcatcaggtcaaagttgtgctggcataagagttgtcatcaggggttaaggagtcagggacgaaacaagcaacctcagagttgagattgtctggacagagaattgcaacacaggattaaggactggacagaggttgtgaaggcaaaaggtcacagcctaggttcatgttgtgtggacagagggccttcgggtaggggcaggggtgaggtcaaggttcggcgggccaggatgaggtggtgcagcctgacaggttgtgacttgggtagagaagtcatgaaggccaggctgaggttgtgagggcagaggggctgttggcaggtgtcagggtccatgccttggctggaaaggtagaggtattaggagctggggaaaggacaggctggctgggtctggggctgagctgaggctgcataggcagaagtcacaggatcagggatgttgcccgcagagtgacccgcaaaggctgggcctaggtttcctgaatagacgtgccgccgggaagttgggggcctggctgaggctgtgcgggcacagctgttacaggcagggggcaggggcctcgtggagcttgtgtagacggaggggcggcgggccgtgtagtgcaggctgcgaagactcaccgcggtgaagtgcggccaggtgcgcagcaggtcgaagagcgcgtcgccggggcagtcggtgcgcaccagctggcggtggcccagcagcgcgtagtctggccgcaggaggccggcgcgcaccgcacaactcgggagcgtgtcgcgcaccgtgcgcagagcggcctcggtgggcagcgccgcggtgtagttgcccactatggccacgccgaagccccgggagttgtggccgagcgtgtgggcgcccacccagtgccagccgcgtccctcgtacacgtagccgtccgagcccaccacgaaactgcagaggggagggagaagcaagcaccatgcggcgtgagggggacccgggcccttatccgctcccctccccgattctgttggtgtgccaagggccaccgaccccaagacccgcgcggtcgcgctgcctgtgtcccatccagctctgttccactctcacaccagctgccactccaggaccgttcggtttctctggatccgcccttcagtactggcacgcccctttctgcccttctcctccccacctctgccttttctcaagcccagttcttgcccaattcagagagcttttctgtttttgggttttttttctttccttccttccttccttccttccttccttccttccttccttccttccttccttctttctttctttctttttttgatggagtttcactcttgtcgctgaggctgaagtgcaagggcgcgatctcggctcactgccacctccacctcccgggttcaagcgattctcctgcctcagcctccggagtagctgggattacaggcacccgccaccacgcccatctaattttttttttaatttttatttttagtagagacggtgtttcgccatgttggccaggctggtctcgaactcctgacctcaggttatctgccctcctcggcctcccaaagtgctgggattacaggcgtgagccactgtgcccagccttctcccctcccctcgccacccctcccttcttcccttcccttcccttcccttttggagacggagtttcgctcttgtagcccaggctggagtgcaacgacgcgatctcggctcactgcaacctccgcttcccaggttcaagtgattctcccgtctcagcctcccgactagctgggattacaggcatgcaccaccacgcccggctaattttgtatttttagtagagacggggtttctccatgttggccaggctggtctggaactcccgacctcaggtgatccacccgcctcagcctcccaaagtgctgggattacaggcgttagccaccgctcccggcctccttcttcttttcgagacgggttctcgctctgtcactcaggctagagtgcagagatgcgatcataactcactcaagcctcgaactcctgggctccagcgatcctcccaccttagcctgccgagtagctgggactacaggcgcgcaacaccatgcccagctttttttttttttttttttttttttttgagacggagtctcgctctgtcgcccaggctggagtgcaatggcgcgatctcggctcactgcaggctccgccttccgggttcacgccattctcctgcctcagcctcccaagtagctgggactacaggcacccgccatcacgcctggctaatttttttgtattttttagtagagacggggtttcaccgtgttagccaggatggtctcaatcttctgacctcgtgatcctcccgcctcggcctcccaaagtgctgggattacaggcgtgagccactgcgcctggcctttttaagttttttttgtttgtagagatgggtggtgtgggggggtgtcttcctatattgctcaggctggtctcgaactcctgggctccagcgatcctctcttctcagcctcccaaagtggtgagattacaggcgggagccaccgcaccaggcctccttgtctgttttaggccatctctgcctggccccagacccagactctgccacaggtcccgctcctctcccagatcccgcctcctgtactagttctctaccctgactggagtcccatgatttagctattcccggtccctattaaggccccgcccctagcctaagccacgccacctctccaactttgctctacctatcaggactcctccttggtcttgccagctttcctcgggttcaagcccggtcccctgcatcaggctccgcccactcagaccccatccccgaacgtgggccccgccccctccccggtcgggcccctcctacctgtagccgatgtctccccagccttgcgtgtcctggtggtagcgctgcatggagcgcatgttggctgcgcagcgcgtgaagtccgtgcagggtggtgcaggcacgtaggtgtgatgcacgtacaagaatcccagcggcagctgcagcagcttcgggcggccccgataaggcgccgctccccagcggcagcgggggtggatggccgggcatcctacaggcaagggggttgaaggctggggtcaggaactgtttctctgcctgttcctccacccgcattaaagcgcacatacagaccatccctcagcctcctctcagatttggaaagggtccagtctcaccccacattggtcctccctggggaccaactaactatactcaactaaatctattttatttttattaaaaaaaattgggggtgggccggacgtagtgggtctcacctgtagtcccagcagtttgggaggacgaggtgggtggatcacttgaggtcaggagtttgagaccagcctggccaacatggtgaaacccggtctctactaaaaatacaaaaatcaaccaggcatggtggcacatgcctgtaatcccagctacttgggaagctgaggcatgagacaacttgcttgagcctgggaggtggaggttgcagtgagccgagattgtgctattgcacaccagcctgggtgacagagcaagactctgtcccccccaaaaaaaaattggaggtgggggcaggcatggtggctcactcctgtaatcaatcccacactttgggaggcgaggtgggtggattgcttgagcccaggagttcaagaccagcctgggcaacatagtgagacctcattttctagaaaaagagaaatcagatttcccaaagcaatctacagattcaatgcaatctctatcaaaatatcaaagtcatttttcacagaattagacaaaactatcctgaaattcgcaaggaaccaaaaatgagcccaaatagcaaaagcaattctaagcaaaacgagcctggtatcacattacctgacttcaaattatactacaatactatagtaaccaaaacagcatggtactgttacaaaaatagacacatagaccaatggaatgaaatagagaacccagaagtaaagctgcacacctacaaacaataattttcaactaagtcgacaaaaataagcaatgggaaaaggactgcctattcagtaaatggtgctaatggtgctgggacaactggccaaccatatgcagaagaatgaaactggacccctaactcttaccatatacaaaaattaactcaaggacagatgcgctagctcacgcctgtaatcccagcaattttggaggctgaggtgggtggatcacctgagatcaagagtttgagaccagcctggccaacatggtgaaaccccgtctctactaaaaatacaaaaattagccgggcatggtggtaggtacctgtaatcccagctatgtgggaggctgaggcaggagaatcgcttgaacccaggaggcagaggttgcagtgagctgagatcacatctttgcactccagcctgggcaacagagcaaaaactctgtctcaaaaaaaaaaaaaaaaaaaaaaaaaaaaaaaaaaaaaaattgctcaagatagattaaagacttacatgtaagacctgaaactctaaaataccagaagaaaacctaaggaaaacgcttctgaacattgggctaggcaaagaattcatgactaagacctcaaaagcacagagcaaaagaaacaaagtagacaaatgggacttaattaaaccaaaaagcttctgcacaccaaagatataatcaacagaacgaacagacaaccttcagaatgggagaaaatatttgcaaactatgcactggtatgggactaatacccagaatttacaaggaactcaaacaattcaagaaagaaaagaaagaaagaaagaaagaaaaagaaagaaagaaagaaaaagaaagaaagaaagaaacccactaaaaagcgggcaaaagacattaatagacatttttcaaaagaagatatacacatggccaataggcaaaggaaaacatgctcaacatcaccaatcatcagagaaatgcaaattaaaaccacaatgagatatcatcttactctaatcagaatagctattattaaaaagacagaaaagccgggtgatggctcacgactgtaaccccagcactttgggaggctgaggtgggtggatcacctgaggttaggagtttgagaccagcctgggccaacatggtgaaactctgtctctactaaaaatacaaaaattagccgagcatggtggcaggcacctgtaatcccagctacttaggaggctgaggcaggagaaacgcttgaacccaggaagtggaggttgcagtgagccgagattgtgccattgcactccagcctgggagacaagagtgaaactctgtctaaaaacaaaacaaaacaaaacaaaacaaaaaaaataataataaattggaactatcattcaatccagcaatcccactactggatatctacccaaaggaaaataaatcattatattaaaaagatacctgcattcacatgttgatcagggcactattcacaatagcaaaggtaagaaattaacttaactgtccatcaaaagagaattggataaagaaaatatgatatatattacaggcctggatggctctgggtctgagagccctggacgaaggtcaggcccaggtttccagctagggtgattgccaggaggttgtctacagtggtcggcaggaaatggaatactactcagctgtaaaaaatgacataatgttggctgggcatggtggctcacgcccgtaatcctagcactttgggaggccaaggtgggtggatcacgaggtcaggagatcgagaccaccctgataaaatgatgaaactccgtctctactaaaaatacaaaaaattacccagacatggtggcacatgcctgtagtcccagctactcaggaggctgagacaggagaattgcttgaacccaggaggcggaggttgcagtgagctgagatcgtgccactgcactccagcctgggcgacagagagagactcaaaaaaaaaaaaaaagaaagaatgtcttttgcagcaacatggatggaactggaggccattatctcaagtgaaacaagtcaaacacagaaagacaaataccgtaagttctcacttataaatgggagctaaataatgtgtatgcatggatgtagcgtgtggaaagatagatagtggagattcagaagggtgagggagagagaggagggaggatgatgacagattgcttaatgggtggatgtatgttattggagtgatgggtacctaaaagcccagacttgaccactatgcaatctatgcgagaaacaaggttacacttgtaccccataaattaatgcaaataaatataatgaagcaaaacaaaatgagatgaactcctattcatccttcaaggcccaactctggcatttcctcacctgtgcagctgtcccacccacccccgaccagatcccttattgccccctctggactctcctagtcctcaacttccctgaatatacggggtgggggcgtctgtgtctgtaatgggaaggatcacagggtgtggggaacttcctcacccaggaaggcctcagtgaattccttggtagcattggcagccacctgggccagctgttcttggctcatgcactgaagctggaggtgtactggctccagcctctgtagaaggacaagggttccccacacctgctgggccaggatggaggctgaagtcagagcagcaccgttctgccgtcggaagttgctgcggaaccctgggtctctggccaccccagccccatagtactggctcagcaagtggctgagggatggccggggctcaggagtccggctcaggtagtctccaaggatgaccccatccagggcgccattgaggaaggccatggttaacagagatgccttggggtccaaaagcgtaaaggtccgaggggcagagagctggtcccagcagccctcagttcccaggtctggatggctctgggtctgggaacctcggaggaaggtcaggcccaggtttccagccagggtgactgccaggaggctgtccaccatggtcggtggggacttggctttggcatctggcaaggaagcttggacatctggacagccttttgtagcatctggagtgttggctccaatatctgcagtggtgacatctggagagccatccctgagtcctggggaggaggtggctcttacatctggagcaatggccacaacatctggaaaggtatctccagtctcccaaggggcagccatgctgtccaagggcaaatttatgaccctgcgcccttgcagccctgcctccagccccgccagcagaggctccacagccacggtcgagccatcaggtgccagcaccaccccatattccttcccttctcgtacgtcatgtcgggccacctccttggtcaggcctaacagctctgggcttagtgggcagggatccaactctgtagcattgaggctccatgcccccagcaggaagtggtagaggcgattgtgggggccagagtttggagctgacatcagccacgcagaagctgtgtgtctggtcttggcagctggcactttctgctccagctcagccagggcctggatgacagagtccatgagcaggggcagggaggctgcaggaggaaagaatgtgttagcccagccccacccattcctgagcctccttgtattgattccacatctacccaatgctcccagccctccatctgataaccccatgacccccaacactatccttgtgtagatgaggaaagtgaggtacacagactattgcctgttggttaaggagctcagactgtctgtgagtactggggagccatggcagatttatgagcaggacagaggtgtgacgaacctggcattctaagactcctttcttaggcttagatttgtttggctgccataaggaaatggatttttggggtgccaggatagaaaaggggagacagtgtggaggtgagagatgaaggtggcagaaggtaggtagtgacattgcagtggacaaaagtggaagagtccccagatcgtgagagggagagatggatggtcttttgtgatgaattgaagttaaaaattggggatgttagagggaaaggtattttgaaagatgcctgggactggctgtggtggcttaggcctgtaatcccagcactttcggaggccgaggtgagtggatcacctgagatcaggagttcaaggccagcctggccaacaccgtgaaaccccatctctaataaaaatacaaaaattagccaggcatggtggtgtgtgcctgtaatcccagctacttgggaggctgagacgggagaatcacttgaacatgggaggtggaggttgcagtgagccgagattgcgccactgcactccagcctgggtgacagagtgagactttgtctcaaaaaaaaaaaaaaaaaaaaaaatgccagacgcagtggctcacgcctgtaatcccagcactttaggaggcagaggcgggtggatcacctgaggtcgggagctcaggaccagccggatcaacatggcgagactccgtcactactaaaaatacaaaaattagctgggcatggtggcacacacctgtaaccccagctactcaggaggctgaggcaggagaactgcttgaacccaggaggtggaggttgcagtgagccaagaaccccccactgcattccagcctgggtgacagagtgagactccatcataaaataaaataaataaaataaaattaaattaaaataaaataaaataaaataaaatagcctgggaggcagggggaagagcaggatgggcttgtgccatgttggggaaatgtcagtggctgaactgcaaacctagaaatgctaagttaggctcagagctggttcagagatgggttatcaaataatagctaactttcagtaaacatttactatgtgctagctactagtctaggtgacttatatattaataatttaacgcagttagtcttcacaactcttgtgaggtaggtccttttagcccctgtcttagtacattggtgctgctataacagatctctgaggttgggtaatttatgaaaaacagaaatttggccaggtgtgctggcacatgcctgtaatcccagcactttgggaggccgaggcaggcggatcacttgaggtcaggagtttgagaccagcctggccaacatggtgaaaccccgtttctactaaaaatacaaaagttagccgggtgcggtggcgggcacctgtaatcccagctacttggggggctgaggcaggaggatctgttgaacccgggaggtggaggttgcagtgagctgagatcatgctgctgcactccagcctgggcgacagagtcagactctgtctaaaaaacaaaaaaaaagaacagacatttatttctcatagttctagaggctgggaagtccaagatcaaagcactggcatttgggacttcctagcctgcagaactgcaagaaagtaaatttctcttctttacaaatttactcagtttcaggtaccctggcctatatagaagcacaaagggactaagatggtgtccctttacagatgaggcatctgaagcacagagaggttaagttacctgcctaaggtcacacaggaaggaagtggcagaggcaggatttgcctttgttttttttttttttttttgagacggagtcttgctctatcatccaggctggagtgcagtagtgctcagctcactgcaacctcctgagttcaagcaattttctggcctcagcctcctgggtagctgggattacaggtgcctgccaccacgcctggctaatttttggtatttttagtagagatggggtttcaccatgttggccaggctggtctcgatctcctgatctcaagtgatctgcccgccttgatctcccaaagtgctgggattacaggcctggccagtagtagaatttgaatccaggaagtcttactcgacacactctcctggtctagaatctaggttcttctccagtccaccacctaacctgtgtagctttgctcttctctgcaaaaaatgccctttctggcttctcccccaaatcatttctctttcttcctagcctagctcttatgtctcctcctccaagaagccttccctacttttgctctccaggccccagattccttcccttatccttgccttgactctgtggagctgggaatatctatgtccccatgctggagcttctttgagagcttgagtctccagcctcactccatgcagggcaagacatagatgggacagcagtacgccttctgcagagccaagaggtttggtcccaggactctgccccctgactcacctgtccctgggtctgaccacagtagcaatccgagtaggatccagaggacaccctgggccattgttgcaggattccagcttccaaggggtatttctggttggcctcggcagagaacctcggcagtgctggagggagacaggcacagagaactgagcagagcctttgaccactgtcaaagtccagcggcgaatgacagacctgcctctcgtagagctgtgggcgggaggcagcagggacatggggcagcgtaccctgggtcaaggtcatctgggcatcctggtctcccccagtctcttctgtccctcctaggctgaggtcagtggtcagtaagccaggcccatccccagaggggcctggagaccaggtggttcagactccataaactctgcccattctccagtgaggtggaccgaggcaacccctcaagtcctgtccctccccatagtgacggctctgtagccgctgctggccaccagaggggactctcagctgccgcctgctgtactggtaagaccggctgtgttgagggagaggagagaagcagaggcctgaagttggcactgccttctgcttttttttgcaaccaacacttcaggctcaggcacagcatcggtgcgggggctgaggacagtgtttgctgaggcctgaagttggcactgcctcctgcttttttttgcaaccaacacttcaggctcaggcagagcatgggtgcaggggccgaggacagtgtttgctgaggcctgctctgagcccatggggaccaggggctgtcacctctcatccagttccagcccttgatttcaagccaccagcagtagctgagagcaggggttgagcttgagtgttcaggaccctggcattgttccaggagctggcttctggactcacctgggctgacagtgaaatgtccttcctcttctccgggtgcccatgactgagacctgcagaatggacccatctcccctttattctggcatcagatggggcaggttgacatgactgggctgttgtgtatgtaaattgcttccctgtggggctcccacctcaaaaccagcccggggagtttccaggagacccaccagctggagactcagccagggcaggcctgggaatgtccagcctgagccaggcctgggattcccctgggggccacccctggggcctcctcaggtgtcctctttctggggacctcccagaaaaaagctgggcacatagtggaagctcaggatgtagggtgctaagtgatagagtgaatgggggacacttcccatgggagtaagagacaatgtcctcctccaagctcgtttcccaggatttggggataggagctttgcctggtagaaccatatgaaggttgtgggctgaggcagggactaggttgaggcatcctctttgccgcaaaatttaaggcagtgttgaaaatctaagtcatcaataactttttttttttttgagacggagtctcgctctgtcacccaggctggagtgcaatggcacgatctcagctcactacaacctccacctcccagattcaagcaattctcctgcctccctgcctcagcctaccaagtagctcaggttacaggcatgcgccaccatgcctggctaatttttgtatttttagtagagacggggttttgccacgtaggccaggctggtcttgaacccctgactcaggtgatccacccaacttggcctaccaaattgctgggattacaagcgtgagccaccatgcccggccgataaataattttaagacttttttagaacagttttattattattattatttttaaagatggagtcttgatatgctggccaggttggtcttaaactcttggcctcaagcaatcctcctgcctcggcctcccgaaatgctaggattacaggcgtgagccactgcacccagctttattttttattttattattattattttttgaggcagggtctccctctgtcacccaggctggagtgtagtggtgcaatcttggcttactgcagccctgcttcccaggttcaagtgattctcctgcctcagcctcccaaggagctgagattacaggtgcccgtccaccacttccagttaatttttgtatttttagtagagacgggatttcagcatgttggccaggctggtctcaaactcccaacctcgggtgatccacctgtcttggcctctcaaagtgctgggattacaggctttttttttttttttttttttttttgagacagagtctcgctctgttgcctaggctgcagtgtagtggcacaatcttggctcactgcagcctctgcctcccaggttcaagctattctcctgcctcagcctcccgagtagctgggattacaggtccccgtcaccactcccggctgatttttgtacttttagtacagatgtagtttcaccatgttggccaggctggtcttgaactcctgacctcaggtgatccacccgcatcggcctctatttttaattttttatagagatgagggtctcgctatgttggccaggctggtctcatctcctggactcaagggatcctcctgccttagcttcccaaagtgctgggattacaggcgtgagccaccatgcctggcctagagcagttttaggttcgtgacaaaattgagcagaagttacagagagttctactccctgccttgacacatgcacagactctcgtattatcactatccagcaccagaatggtatatctgttacaatcgatgaaccttcactgacacatcattatcacccaaagttcatcatttccattagggtttgctcttggtggtgtacattctatgggtttggacaaatgtataatgacatatgtccaccactagagtgtcatacggagtacagttgacccttgaacaacatgggtttgacctgtgagggtcaacttatatctggatttgtttcaataaaaattacatggactgtgcctgcctctcctctccccttcctcctcttccacctctgccacccctgagacagcaagacccctcctcttcctcctcctcagcctactcaacatgaagacggtgaggatgaagacctttatgatgattctctacttaatgaatagtaaatatacttcctcttccatattttcttccttctcttccttctcctttcttcccttctccttccttccttccttccctccctccccccttcctccctccctcctttctttcttttttctttctttctttcttcctttctttctttctttctttctttcttccttccttccttccttccttccttccttccttccttccttccttccttctttctttctttctttctttctttctttctttctttctttctttctttctttctttctctttcttctctttctttctctttttctctttctttctggcagagtctcattctgtcccccaggctggagtacagtggcgtaatctcagctcactgcagcttccatctcctgggttcaagcgattctcctgcctcagcctcctgagtagctgggattacaggtacctgccactatgcccggataatttttgtatttttagtagagatggggtttcaccatgttgggcaggctgatctcgaactcctgacctcaggtgatccatccacctcagcctcccaaagtgctgggattacaggcatgagccactgcacctggctcgtggattttttccaataagttacatggagtgtgtctgcctctcctctctccccttccacctcctccacctcttccacctctgccacccctcagacagcaagaccaaccccttcccttcctccccctcagcctattcaacatgaagacgatgaagatgaagacctttatgatgacacacttctacttaatgaatagtaaacatacttcctcttccatacgattttcttagtaactcttcttttttcccaggttcaggtgattccctcgcctcagcctccagagtagctgggactacaggcatgcaccaccaaggctagctaagttttctatttttagtggagatggagttttaccacattggctaaactggtcttgaactcatgaccccaggtaatccacctgccttggcctcccaaagtgttgggatgacaggcgtgagccactgcaccccacctgatttccctttaaagcttggagttggggcagagactgccttgttttaagccaggggcatgtcatggatggcaggctctttccttagggtctatgtaggatttgtgaccttctggggcaggacccttcctccagggagcctctgtggttaccccttgctccccttactcctcccagctccctgacctgctgttcttcccttcaacctaggctgtgcttacagtgctggaaggttctttgtccagttttgtctccccaaatctaggagatgctgagtttttggggctgtccagaagtgcccagcacagactcaagaccaagtgagtgtcagggagggattgctaaatgcacaaaaagcctgatgaatgatgtggggccagtttggggtcaggatctgaaacacacacatgtacacccacattcaggcactcacacaccaatgcatcagggctgggctgggcctgggaggcagaaagaaggctggaaatcccacaatgaatcacctctaccccaggtttccttcaacctcaggaggcccacttgtcagataaatcaaggccccttggccgggtgcggtggctcacgcctgtaatcccagcactttgggaggccaaggcgggcagatcacctgaggtcaggagttcaagaccagcctgaccaatatgatgaaaccccgtctctactaaaaatacaaaaattagctggtgtggtggcatgcacctgtaatcccagctactcaggaggctgagacaggagaattgcttgaacccgggaggcagaggttgcggtgagctgagatcgcgccattgcactccatcctgggcaacaaaagcaaaactctgtctcaaaaaaaaaaaaaaaaaaaaaaatcaaggcccctccaggctgcagagagactagaggggtcacaagagtagccactgattatggagcagggccggctctcatgagttgtagcattggcacagataggcagagcctctggccctagatcttaagcaaggctgggatgaggccagaggagaaggaacttggggcagggctgggcttgggctcaacgtcagagtcgacagcgttcactatggtggcactaatgatgctaataatgaagaccccgctcgctactactgttacaggaatggggtcccgatccagaccccaagagagggttcttggatctcgcgcaagaaagaattcagggtgagtccacagagtaaagtgaaagcaagtttattaggaaagtgaaggaataaagaatgactgctccataggcagagcagccctgatagctgctggctgccttttttttttttcagacggagttttgctcttgttgaccaagctgaagtgcaatgacatgatctcggctcactgcaacctctgcctcctgggttcaagcgattctcctgactcagcctcctgagtagctgggattacaggcatgtgccaccacacctggctattttttttttttttgagacggagtctcgctctgtcgtccaggctggagtgcagtggcgccatctccactcactgcaagctccgcctccctggttcatgccatgctcttgcctcagcctcccgagtagctgggactacaggcgcccaccactatacccggctaattttttgtatttttttttttttttttttttttagtaaagacagggtttcaccgtgttagccaggatggtctcaatctcctgacctcgtgatccactcgactcggcctcccaaagtgctgggattacaggcgtgagccactgtgcctggcctaattttttgtatttttagtagagatagggattcaccatgttggccaggctggtgtcaaactcctgacctcaggtgatccttccgcctcggcctcccaaagtgctgggattacaggcgtgagccaccgcgcccagcctggttgcctatttttatggttatttcttgattataggttaaacaaggggtggattattcatgcctcctcttttaagaccatataggataacttcctatcattgccatggcatttgcaaactgtcatggcgctggggagtgtagcagtgcggatgaccagaggtcactcttgtcgccatcttggttttgatgggttgggctggctgctgctgctttttttttttttttttggaggagtttcacttttgtcgcccaggctggagtgcagtggcgcaatcttggctcactgcaacctccactccggggttcaagtgtttctcctgcctcagcctcccgagtagctggaattacaggcgtccgccaccacacccagctaatttttgtatttttggtagacaatgtttcaccatgttggctaggctggtctcgaactcctgacctcaggtgatctgcccacctcggcctcccaaagtgctgggattgcaggcataagccactgcatccggccgtgcaggcttctttactgcgatctgttttattagcaaggtctttatgacctgtatcttgtgccaatctcctatctcatcctgtgacttagaatgccttaactgggaatgcagcccagcaggtttcagccttatttcacccagctcctgttcaagatggagttgctctggttcacaggcctctgacactactaataaaaagtgctgtgtgtggggctctgagctaaggttttatgtgcctgtgcctgtggttattttttttttcctttttttttttttaatcactgggatttgttaagcaatgttctacagcagaagtcagagaacctcagcttatgaactggatgtctgtttttgtaaaactgttttttgaggtgaaattcacctaacacaaaattcaccattttattatttatttttttttttgagaccgagtctcactctgttgctcaggctggagggcagtggcgggatcatggctcactgcagcctcgacctctggggctgaagggatccccgcccccagcctcccaagtagctgggactacagatgtgtgtcatcacatccagctaattttttgattttttgaagagatggggtcttgctttgttgcttggactggtctcgaactcttgggctcaagtgatcctcccaccttggcctcccaaagtgctgggattacaagtgtgagccatcacacctggccaaaatttaccattttaaactgtgtggtttagaggcacttagcatatttacagtgttgtgcagttgtcacctctatctagttctaaagaatttgcatacccctaaaagaaaaccctgtcctcatcagcagtcattcctcattcacccttcccctgcccctggcaaccacaaacctgctttctgtctctatggattcgcctgttctggacatttcagatcaatggaatgtcacactatggccttttgtgtctgtctttttttttttttttttttactcagcatcatgttttcaaggttcatcatcatagcctggatcagtgcttcattccttttcagggctgcataatattccattgtgggaaatgatcacgatttgtttaggtgattgaatgtttattggaacacacttccttccattcatttacatttctatggctgttttcctgctataatggctgagtcacaaagcagaaactattgactatctggccttgtccgcatcagcagtcactcctcattccccctcccacagcccctggcaaccacaaatctgctttctgtctctatggattcgcctgttctggacatttcagatcaatggaatctcacactatggccttttgtgcttgtcttttttttcacttagcatcatgttttcaagcttcatcgttatagcctggatcagtgcttcattccttttcagggctgcatagtattccattgtatgaaaggatcacaaattgtttaggtgattgaatgtttattggaacacattcccttccattcatttacgtagctatggtggctgttttcctgctataacagctgagtcacaaagcaaaacatatttatttactatctgggctttttttttttttttttttttgagatggaatctcgctctgtcgtccaggctggagtgcagtggtgtgatctcggctcactgcaacctctgcctcccaggttcaagcaattctcctgccctgcctcagcctggctcttttttttaattctttttttttgagacagagtctcactgtgtcacccaggctggaatgcagtggcacgatctcggctcaccacaacctcacctcctgggttcaagtgattctcctgtctcagtctcccaggtagctgggactacaggcatgtgctaccatgcccggctaattttttgtattttttttagtagagatggggtttcaccatgttagccaggatggtctcgatctcctgacctcgtgatccgcccgccttggcctcccaaagtgctgggattacaggcatgagccaccgtgcccggcctatctggccttttaatacaaactttgctgacccctgccgagccagcccgcctggattcaaatgcctatgctgctgcttactggctggagaaggtggctttatctctagtcttcattttgtccatctctaaaatggaagaatagtaccaactgcaaagggtgactgttagggttaaatgagttgatacttgtataaagtgcttaaaacagtgcctagcatggctgagtgtggtggctcaagcctgtaatcccaacactttgggaggctggagtgggcggatcacctgagaccaggagttcgagaccaccctggccaacatagtgaaacctcatctctactaaaaatacaaaaattagccaggcgtggtggtgtgtgcatataatcccatctactcaggagtctgaggcaggagaattgcttgaacccgggaggcagaagttgcagtgagccgagattactccactgcattccagcctgggcaacaagagtgaaactctgtctcaaaattaaacaacaacagcaaaaacaacaaaaatcccacacacacacacacacaaaaacacgtggaatgcacttgatgagtagggagtagaggatggtgatgtcctcggttcctgttgtcccacccgcctgccccagcctccccagcaaatgtttagcccagcccatgggaaaaatccatttaattattgtcatggctggattcccatctcctagaggagtccagactcatagtcatgcattatttctccatctggggcacctgtccaagcccaaggcttccctgctggcccctggtcttccagtagccagctgggccttagggctgggcctggagccgatctggaaccacagccaaatcatgaaagccaaggtcagccagcccccaaatcagtcgagcccaattcactaaaaagagactcaagtcatgacatgagccagcgaccgtgcggcccccagctggggcttttctgccattcccagtgggcagaagttgacttcaattgcatctttctgggacatcagaggtgagatttaatctctcaggcaactggtcctggaactggggaggacggagtttagtaatttgagatgtgggatactgtagagatatggtgagcttagctcttgccagtatgcgaggggccaagactgagtgtggggggatggggccatatcttagcgcttcctggtggaatatttacagagcacacacgggctcttagctgtcatcaccctgcttcagagaatgacacagggcaaagggctttaaacatatcttctatagaaaatcccaaacatattcaaaagtagagagaattgtaaaaaacccctacgcataccgatcaccgaattgacatcttcaaatcacaattcatcttgtttcttctatactccacccattgtctctcttttgtgatattatctgctgttgacgatcattgccaggatctattaattcattagtaggaataacataatgacatttgagtgataatattcctccttcatgtattagctgaaatacttctttttattattattattatactttaagttttagggtacatgagcacaacatgcaggtttgttacatatgtatacatgtgccatgttggtgtgctgcacccattaactcgttatttagcattaggtatgtctcctaatgctatcccttccccctcccccgaccccacaacagtccccagtgtgtgatgttcccattcctgtgtccatgtgttctcactgttcaattcccacctatgagtgagaacatgtggtgtttgtttctttgtccttgcgatggtttgctgagaatgatggtttccagcttcacccatgtccctacaaaggacatgaactcatcattttttatggctgcatagtattccatggtgtatatgtgccacattttcttaatccagtctatcattgttggacatttgggttggttccaagtttttgctattgtgaatagtgccacaataagcatacgtgtgcatgtgtctttatagcagcatgattgataatcctttgggtatatacccagtaatgggatggctgggtcaaatggtatttctagttctagatccctgaggaatcgccacactgacttccacaatggttgaactagtttacagtcccaccaacagtgtaaaagtgttcctatttctccacatcctctccagcatctgttgtttcctgacttttgaatgattgccattctaactggtgtgagatggtatctcattgtggttttgatttgcatttctctgatggccagtgatgatgagcattttttcatgtgtcttttggctgcataaatgtcttcttttgagaagtgtctgttcatatcctttgcccactttttgatggggttgtttgtttttttcttgtaaatttgtttgagttcattgtagattctgcatattagccctttgtcagatgagtagattgcaaaaaatttctcccattctgtaggttgcctgttgactctgatggtagtttcttttgctgtgcagaagctctttagtttaattagatcccatttgtcaattttggcttttgttgccattgcttttggtgttttagacatgaagtccttgcccatgcctatgtcctgaatggtattgcctaggttttcttctagggtttttatggttttaggtctaacatttaagtctttaatccatcttgaattaatttttgtataaggtgtaaggaagggatccagtttcagctttctacatatggctagccagttttcccagcaccatttattaaacagggaatcctttccccatttcttgtttttgtcaggtttgtcaaagatcagatagttgtagatatgcagcattatttctgagggctctgttctgttccattggtctatatctctgttttggtaccagtaccatgctgttttggttaccgtagccttgtagtatagtttgaagtcaggtagcatgatgcctccagctttgttcttttggcttaggattgacttggcaatgtgggcttttttttggttctacatgaactttaaagtagttttttccaattctgtgaagaaagtcattggtagcttgatggggatggcattgaatctgtaaattaccttgggcagtatggccattttcacgatattgattcttcctacccatgagcatggaatgttcttccatttgtttgtatcctcttttatttcattgagcagtggtttgtagttctccttgaagaggtccttcacatcccttgtaagttggattcctaggtattttactctctttgaagcaattgtgaatgggagttcactcatgatttggctctcagtttgtctgttattggtgtataagaatgcttgtgatttttgcacattgattttgtatcctgagactttgctgaagttgcctatcagcttaaggagattttgggctgagacgatggggttttctagatatacaatcatgtcatctgcaaacagggacaatttgacttcctcttttcctaatcgaataccatttatttccttcttctgcctgattgccctggccagaacttccaacattttgttgaataggagtggtgagagagggcatccctgtcttgtgccagttttcaaagggaatgcttccagtttttgtccattcagtatgatattggctgtgggtttgtcatagatagctcttattattttgagatacgtcccatcaatacctaatttattgagagtttttagcatgaagggttgttgaattttgtcaaaggccttttctgcatctattgagataatcatgtggttttggtctttggttctgtttatatgttggattacatttattaatttttgtatgttgaaccagccttgcatcccagggatgaagcccacttgatcatggtggataagctttttgatatgctgctggattcggtttgccagtattttattgaggatttttgcatcaatgttcatcaaggatactggtctaaaattctctttttttgttgcctctctgccaggctttggtatcaggatgatgctagtctcataaaatgagttagggaggattccttctttttctattgattggaatagtttcagaaggaatggtaccagctcctccttgtacctctggtagaattcggctgtgaatccatctggtcctggactttttttggttggtaagctattaattattgcctcaatttcagatcctgttattggtctattcagagattcaacttcttcctggtttagtcttgggagggtgtgtgtgtcgaggaatttatccatttcttctagattttctagtttatttgcatagaggtgtttatagtattctctgatggtagtttgtatttctgtgggatcggtggtgatatcccctttatcattttttattgtgtctatttgattcttctctcttttcttctttattagtcttgctggtggtctatcaattttgttgatcttttcaaaaaaccagctcctggattcattgactttttgaagggttttttgtgtctctatttccttcagttctgctctgatcttagttatttcttgccttctgctagcttttgaatgtgtttgctcttgcttctctagttcttttaattgtgatgttagggtgtcaattttagatctttcctgctttctcttgtgggcatttagtgttataaatttccctctacacacttctttgaatgtgtcccaagagattctgctatgttgtgtctttgttcttgttggtttcaaagaacatctttatttcgttatgtacccagtagtaattcaggagcaggttgttcagtttccatgtagttgagcggttttgagtgagtttcttaatcttgagttctagtttgattgcactgtggtctgagagacagtttgttataatttctgttcttttacgtttgttgaggagagctttacttccaactatgtggtcaattttggaataggtgtggtgcggtgctgaaaagaatgtatattctgttgatttggggtggagagttctttctttcttttcttttctttttttttttgagacgagtctcgctctgttgcccaggctggagtgtagtggcacgatctcggctcactgcaacctccgcctcccaggttcaagcaattctttgcctcagcctcccaagtggctgggattacaggtgctcaccaccacgcccggctaatttttttatatttttagtagagacggggtttcaccatcttggccaggctggtcttgaactcctgaccttgtgatccacccgccttggcctcccaaagtgctgggattacaggcatgagccaccgcgcccagcctcggggtggagagttctgtagatgtgtattaggtctgcttggtgcagagctgagttcaatttctggatatccttgttaactttctgtctcgttgatctgtctaatgttgacggtggggtgttaaagtctcccattattattgtgtgggagtctaagtctctttttaggtctctaaggacttgctttatgaatctgggtgctcctgtattgggggcatatatatttaggaaagttagctcttcttgttgaattgatccctttaccattatgtaatggccttcttttggtctttaaagtctgttttatcagagactaagattgcaacccctgcctttttttgttttccatttgctcggtagatcttcctccatccctttattttgagcctatgtgtgtctctgcaggtgagatgggtttcctgaatacagcacactgataggtcttgactctttatccaatttgccagtctgtgtcttttaattggagcatttagcccatttacatttaaggttaatattgttatgtgtgaatttgatcctgtcattatgatgttagctggttattttgctcattagttgatgcagttctatagaaagaaacagtctcggctgggtgcggtggctgacgcctgtaatcccagcactttgggaggccgaggtgggtggatcacctgaggtcaggagttcgagaccagcctggccaatatggcctactaaaaatacaaaaattagctgggtgtggtggtgcatgcttgtaatcccagctactcaggaggctgaggcaggagaattgcttgaacttggtgggtggaggttgcagtgagctgagatcacgccactgcactgcagcctgggtgacagagcgagactctatttcaaaaaaaaaaaaaaaaaaggaaagaaacagtctctcatcttccatttggttacccagtggtaccattcatatgggaaaggcaagatgagcacttgattcttgttcttttctagtttatttatttatttatttatttgagatggagtttctctcttgttgcccaggctagagtgcaatggcatgatctcagctcactgcaaactctgcctcccaggttcaagcgattctcctgcctcagcctcccgagtagctgggattacaggtgcccgccaccatgcccggctaatttttgtatttttagtagagacggggtttcaccacgttggccaggctggtctcaaactcctgacctcaggtgatctgcccgcctcagcctcccaaagtgctgggattacaggcatgagccaccccgcccggcccgtttatttatttatttatttatttatttatttatttatttatttatttatttttgagacagagtctcgctctgttgcccaagctggagtgcagtggcatgatctcggctcactgaaacctctgcctcccaggttcaagtgattctcctgcctcagcctcccgagtagctgtgattacaggcacctgccaccacacccggctaatttttgtatttttagtagagacggggtttcaccacgttggccaggctggtctcgaactcctgatctcaggtgatccaccggcctcggcctcccaaagtgctgtgattacagacataagccactgcgcctggcccgtttatttatttttatttatttatttatttttgagacggagtctcgctctgtcgcccaggctggcatgcagtggcatgatctcggctcactgcaacctctgccttccgggtccaagcaattctctgcctcagcctcctgagtagctgggactacaggtgcgcaccacctcggctaatttttgtatttttagtagagatggggtttcaccatcttggctagtctggtcttgaactcctgacctcgtgatccacccgcctcggcctcccaaagtgctgggattacagacatgagcgcccagccttgggtcccttaatatcctcaaaaagtaaacactgagattttttttcccttatagatttacgatctcattaaactaatgaaatatgtcaatacattgcagtttttatcattactgataatcaaattggcttccttctttggctggtgggagtctctttatgttgactcctgtgttcttttggcatggctcagagtcctaggtggctttcttgcttcatgacataacaagatgttctaaccagatgctgtgggaacatcttgttcatttcctgccacaggcctgggatcagcaatttctcccaggaacccttattcctttgattggaaaatgaggaatcagctccacaatcaaggagctgaagtgctcatggctaataagttagttttgtttctaggtattttcactggacacaaatagaaaatcccccactattttttttttaaagacggagtcttgctctgttgcctaagcaggagcgcagtggcgccatctcggctcactgcaacctccacctcccgggttcaagtgactctcctgcctcagcctcccgagtagctgggactacaggtgtgcatcaccacgcccagctaattttcgtatttttattagcgacggggtttcaccatgttggccaggatggtctcgatatcttgacctcgtgatctgcccacctaggcctcccaaagtgctgggattacaggcgtgagccactgcaccagccccccacctattttttctttttgagaggcggtctccatcacccaggttggagtgcagtggtcccatctcggctcattgcaacctctgcctctcaggctcaagtggtcctcccacctcagcctcccaagtaactgggaccactggcgtgccaccatgtccagctaatttttgtatcttttgtagagacagggtttcaccatgttgcccaggctggtcttgaactcttgagctcaggtgactgcccacctcagcctcccaaagtgctgcgattataggtgtgagccaccatgtctggtctcccactacctttttttttaattttttaaaaatatatataacatgggccaggtgtggtggctcacacctgtaatcccagcaatttgggaggccgaggcaggtggatcacctgaggtcaggagtttgagaccagcctggccaacatggtgaaaccccacctctactaaaaatacaaaaattagccgggcatgatggtgggcacctgtaatcccagctactcaggagcctcaagatatatatatatatatgaaatgagtttgtattgatgcttccaattcatattttggactaaatgccttttatttagcctgatcaatttgatacctgcatttttattttcccacactgaaaatccaaattctcaccaccaccaacacattcactcatttgctttattccacaatacacacacattaatcccagaagaacacaccaacagtatcttaagtgatatggttatgggaaacagtttaacatttttcccctgtcccttttcattttggtatattccactagggatgtaccattaaattactgagctaaaatactttctttctgattggttatgccggtaaccagaagtgtttaatttctagggccttttttttgagtgtagaaagtatttactttaaaaatagctacaatactcgggaggctgaggcaggagaatggcgtgaacccgggaggcagaggttgcagtgagccgagatcgcgccactgcactccagcctgggtgacagagtgagactctgtctcaaaaaaaaaaaaaaaaaaaaaattacctacaacaataaaaacaacatctcacaataagattgtgcattataactgcaactattaatagaaccactgttcaattagaaaatacctgaaatagggctgggtgcagtggctcatgcctataatcctagcactttgggaggctgaggcaggtggattgcctgagctcaggagttcgagaccagcctgggcaacacggtgaaaccctatctctactaaaatacaaaaaattagcggggcttggcggcatgcgcctgtaatcccagctactcaggaggctgagacggctgaattgcttgaacctgggaggtggaggttgcagccagccgagattgagccattgcactctagcctgggcgacagagcaagactccgtctcaaaaaaagaaaaaaaaaaaagaaaagaaaatacgtcaaataacaggattaataatgtcataataacaattatcattaatctattattatttattattattatttttgagacagagttttcgctcttgttgcccaggctggagtgcaatggcacgatctcggctcaccacaacctccgcttcccaggttcaagcgattctccttgctcagcctcccgagtagctgggattacaggcatgcaaccaccatgcttggctaattttgtatttttagtagagatggggtttctgcatgttggtcaggctggtctcaaactcccgacctctggtgatctgcctgcctcggcctcctaaagtgctgggattacaggcgtgagccactgtgcccagcctgttattattaatattatcgttaatattaatctgttactattgcaaacttcacctattacctccatcccccacccccatttaaaaatgtcattataaatatagtaccttaggccaggcacagtggctcaggcccataatcccagcactttgggaggccgaggggggtggatcacctgaagtcaggagtttgagatcagcctggtcaatatgatgaaacctcgcctgtactagaaatacaaaaagtaaccgggcatggtggtgcatgcctgtaatcccagctactctggaggctgaggcaggagaatcgcttgaacccagcagtgggaggttgcagtgagccaagatcgtgacactgcactccagcctgggcgacagaacgagattttgtctcaaaataaataaataaattaaaaaataaaaataaaaaataaataaatatagtaccttaccacatgcagctttgagttactgggtcattcagacgaagtaataccacattacttttttactgtggtaaaatacacataacatacaatttaccattttagccatttttacgcgtacagttctagggcactgagtacattcacgttgtgcaaccatcaccaccagccatctccaaaactttttggcttccccagctgaaactctgtccccgttaaacattaacttcctattccctactccccgccaagcccctggcaaccatcattctactttctgtctctatgaatttgactgctgtagttacttcatatcaatagaatcatacaatatttgtccttgtgactggcttatttcactttcctataataagataaacgcatatataattcagccagatattgccagttttctctccccagggattactttgcattctccattagttaagcatgtgagtgtgtaaaatactcccaagccttttcatttgacctggcagactcctatatattctttaaaacccacctctggctgggcgcggtggctcaagcctggaatcccaacaatctgggaggctgagattaataagggaatttacacaacactttcctgaggacagaccacgttcacacctacctccctgttggagcctcaggaccaccttaagagggaaggaggaggaccactcccattttacagttgagaaaaatgaagcacagagacgctaagatgtgtacctaaggccacagagctggtgtcagagccaggcctagatacctacctgcctgcttttcctgaaggggaattcttattaacagagggacaaggttgcttctgataggctgtaggagccggggtgcagtagggggtgggggtggggggaaggggagggaagaatctgattggccgaggaaccaaaaagtggaagtagttggtagggtgggtagacaagcaaagtctgattggctggaaagtaggatatggaagtctgattgggtgagagttaagagagtagtttaattgactaaggcagactctgattgactgaggggttggagagcagcgtttagttgcgggagggggaagagggcggagtctaatcggatgaaaaacaggagactggggtttgattgactgagggatatgagagcatttaatttgctgaggtgtgggagggtggaatctgattggctgggggaaactcagcatgaagtttccccgggggtgttagcaatgtcatttctgctctccttcacaaatcccgtgtctctgggccctggtagaaggaggtggagattaatctcctaggactatggggaaatggaggcagatgtgtgtggaggaggggagggggctgagtcactccaggcaaaggccagagaggacacctccccaaccatacctgctgagaaagaatcttgttctccacctcccatcacgcctcctgcagagtgaccactaggatttatggcccagaagagagaggtgtcacccagcccctctataattcccagggaggaagcaggggtcctcttcattccttccccttccccagcagaaccccttctccccaatcctttcccttcctaggggaccacactcttcatctctctagtttctgatgacaaggacctctcctccctccacctgcctgcccaaaggcatcttcttgcacccactgagtttttttgttttttgttttgggacggagtctcgctctgtcgcccaggctggagtgcagtggagtgatctcggctcactgcaacctccgcctcccgggttcaagcgattctcctgcctcagcctcccgagtagctgggactacaggcgcctgccaccacacctagctaatttttgtatttttagtagagacggggtttcaccatgttggccagtatggtctcaatctcttgaccttgtgatcctcctgcctcggcctcccaaagtgctaggtttacaggcgtgagctacctcgcccggcccccactgcgtttttatcgctattgtcttcctccaccgggagcttctctcccctcccttcctccaccccaatcttcctgtttgactgtctttatctctcttccttcacccttcttcttctcttctactcactccgttaaaaactccagcctaggccaggcacggtggctcatgcctgtaatcccaacactttgggaagctgaggcttgagcccagggcaacatagtgggatcccccctgcccatctctacaaaaaaattaaaaaattagctgggcgtgttggtgagcgcctgtagttttagctacttgagaggctgagatgggaagattgcttgagcccaggaggtcgaggctgcagtggactatgtccgcaccactgcactccagcctggatgacagagtgagaccctatctcaaaaacagaacaaaacctccagcctaaatgatgcccaggtggaaaaccttggagttacatccagtctgtcagcaaatcccatcagctccaccttttattaaacaaatcccaaactctaccacctttcacaactctaagttccttcagggttgggcagtgaggaagcaagctcttgctccccgtttactctgttcatgatattgcagccagaggaagcctgttaaaacctctcaggggacatcccttctctgcctagaaccctgtatggctcccaccttcctcagagtaataacctaagccctctcagtggtcccccaggtcctagacaacctgtcctgtcacttccctgcatttatctcctcccggtatccccctcactcactctgctgcagcttcactggcctcttgactgttctttaaggcatggtccagcctcaggtcctttacacaggctgtgccctctgcttggaatgcttaagatccctgttcaaatatcaactcctcagagagggcttccacatctccttaccttgctaggttttgtcccatagcacatatcacatagattatacacttttaatttatgtgtttttgtttattcactgcagagcaatgcctggtaccatgtgcaaacttggcatttgttgaatgaatatgtgctatgtgacagctggggctggggacaaggcagagaaagagaaagatcccttttacctgcgtggagtttacagccctatccagggctaaacaaatcattccaagaggcaggcacggtggttcatgcctgtaattccagcactttgggaggccgaggcgggtagatcacctgaggtcaggagttcgagaccaacctgatcaacatgctgaaaccctgtctctactaaaaatacaaaattatctgggtgtggtggtgcatcccagctacttgtgaggctgaggcaggagaatcacttgaactcgggaggtggaggttgcagtgagccaagaccgcgcattgcactgcagcctgggcagcaagagcaaaattctatctcaacaaaacaaaacaaaacaaaaacaaaacaaaaaaatcattccaagagcaattttactgggagcgaggacactcaggggctgtggctgcattgagtatgggctggaactaagcccagtgactggggaagccctcagaaaaaatggccttaagtaggagttagttgggtgggtgagaggaagataattccaagcagagagaagagcatgtgcaaaggatttaaagttggagagatggtctttgatgggtttggcaaaaatggtcccaagtggcttgtgtgtggatggggagaaggaaagtggccagcacatgttaaaaggggccatttaacaccccacttgcctctcacctttgaattgctttccttccttccttccttccttccttccttccttccttccttccttccttccttcctttctctcgctctctctctttttttcttttttttttttttcggagttttgctcttgttgcccaagctggagtgcaatggcatgattttggctcactgcaacctccacctcccaggttcaagcaattctcctgcctcagcctcccaagtagctgggattacaggtgcgtgccaccatgcccagctaattttttggtatttttagtagaaacggggtttcaccatgttagccaggctggtctcgaactcctgacctcgggtgatctgcctgccttggcctcccaaagtgctgggattacaggcatgaactaccatgcccagctgtgttgctttctttgtttgaaatctctgatatcacctgttctgtttccacttttctgcctcactgtttttgtgtcccaggaggctgatgtatatggaccactcaatgagctcctttgtcttgtggcttccagttgggttgaaacagcagggagccatagcaggcattggagggagggaggaaagtgaggttaggttatttgtaactcatcttctttccatgcaggctggctgtgtccctccaccggaggttcagaactcttgacaggtggacctctttgcatagccctgtctggtccaggttctagcaactttagttccttggccccaggtcctaggggtggtaactaatttcagctgttaccagcccctggtgtgctgcactatccctttgaaaatagtgctttttattaaactctctacaaattactccacttaagtgttcggtctgtttcctgccgagttcttttttatttttattttttttgagatggagtctcactctgtcactcaggctggagtgcggtggcacgatcttggctcactacaacctctgcctcccgggttcaagtgattctccttcctcagcctcccgaatagctgggactacaggcgtgagcccccatgcccggctaatttttgtatttttagtagagacagggtttcaccatgttgacgaggctggtctcgaattcctgagctcaggagatctgcccgcctcggcctcccaaagtactaggattacaggcataagccaccgcgcctggccctcttttgtttttagagacagggtctcactctgttgctcagactggagtgaagtggtgcaattgtagctcactgaaacctcaaactcctgagctcaagcaatcgtcccacctcagcctcctgagtagctgggactacaggcatgtaccactatgcctaatttgttattttttataatttttacaaaaaattattttttttagagatggggtctggctatgttgctcaggctggtcttgaactcctggactgaagcaatcctcctgcctcgacctcccaataataataattatatatataattattatatatattatatataataattattatatattatatatatataattattatatatatataatatatatatatataaagtatttattttaattgaggtgaggccgggcacagtggctcatgcctgtaatcccagcactttgggaggctgaagagggaggatcacttgaggccaggagtttgagaccagcctggcgaacatggcaaaaccccgtctctactaaaaatataaaaaaattagctggctgtgtgtcacaggcctgtaatcccagctacttgagaggctgaggcacgagaattgtttgaacccaggagccggagtttgcagtgagttgagatcgcaccactgcactccagcctgggcaacaggtgagactctgtctcaaaaaaaaaaaaaaaaaaaaaaaaaaattgaggtgaaattcacataacataaaattaaccctttaaagtgtagaattcagtgacatttagtgcattcacaatgttgtgcaactatcacctttatctagttccagtgtttttgtcaccccaaaaggaggtcctataaccactccccctgggtatgggcttctctctccatcccccctcccccagcccctggcaacaactactccactttctgtctctgtgaattcacttagtctgaatatttcatataaatgtaataatgcactgtgtgaccttttgtgtctggtttctttcactcagcacaatgtttatgaggctcatccacattgcggcatggatcagggttttatttatttttatttgtattttttttttcagacggagtctcactctgtcccccaggctggagtgcagtggtgcgatcttggctcactgcaatctttgccttccgggttcaagcgattctcctgcctcagcctcccgagtagctgggattacaggtgcccgccaccgtgcccagataatttttgtatttttagtagagacagggtctcaccatgttggccaggctggctcaacctcctgacctcaggtgatccacctgcctcggcctcccaaagtgctgggattacaggcaagagccacctcgcccggcctttattcttttttatgactgagtaatattccattgtatggatggaccacagtttgtttatccattcatctgttggtggaatttgggttgtttccacctttggctataataaatcgtgctatcccgagcactcctctacaattacgtgtgagtaactgttttcttttctctttctttctctttatctctctctctctctctctctctctctctctctctctgtctcttctttctttctttttctttttttttgagacagggtctcattctgtagccaggctggcgtgaagtggtacaatctcagctgactgcaatctcagcctcccagtctcaagctgtctatcctcccacctcagcctcccaagtagctgggactataggtacgcacatcatgtccagctaattttttatattttgtagaaatgaagtcttgctatgttgttccccaggctagtctggaactcctgggcttaagtgatgctctcttgcctcagcctcccaaagtgctgagatgacagctgtagaccactgtacctggcaagtacttgttttcagttattgtgtgtgtatacctaggagtggaatatctgggtcctatggtaattctgattagctttttgagaaattcccaaactgttttccactgtggctgaaccattttacgttgccaccagcagggtatggcgagatccctcttctttttatctttgactccctgccatgacctgccacatccactcccagacagctttctactaccatttcccaagtccagccacagcctccacttcctcccctcccacttcaacctcaccccactgagccctgggctgtggcaggctgagggctctggtggcatgggaaccacacagctctagagcttgggttccttgacgtctaggtgccagtgatggtccctactaccactcttctcaaactccatctccagctccagctcagtgctgctgcctgtcctctctataaatgtagctattatctctgaggtcaggagtttgagaccagcctggccaaaatggcaaaaccctgtctctactaaaaatacaaaaattagccgggcgtggtggtgcaagcctgtaatcccagctactcaggaggctgaggcaggagaattgcttgaacccgggaggtggaggttgcagtcagccaagatagcaccactgcactctagcctgggtgacagagcaagactctgtttgattaaaaaataaaataaaaggccaggcacggcagctcatgcctgtaatcccagcactttgggaggccaaggcaggtggatcacttgaggtcaggagtttgagaccagcctggccaatacggcgaaaccccgtctctactaaaaatacaaaaattagccgggcttggtggtgggcacctgtagtctcagctactcgggaggctgaggcaggagaatcgcttgaccccgggaggcggaggttacagtgagccaagattgtgccactgtatccagcctggacaacagagcaacagagtgagactccatcttaaaaaaaaaaaaaaagtggctgtgatccccacttctgccctcccctcctcttctctgcccacctccctcctgagtgatctcgctgacctactgccatgccatccaccgtcttcccaaggcaggtgactcacagatgcaattctcaggaggtgccctcacgctgagcccaactgcctcctggatgtctccctgaatgtcatcccatgagacccacgagacttttagactgaaggtgacccacggtttcccaatcttagcactgtcaacatttgagcctggattattctttgggggtgggggtgttctggatgttgaataatatctctggccttcacccactagatgtcagttgcaccaccctgaattcccccacccccacctctaccccccacccagcagtatgatctcctgatgttgctaaacattccctggcggaaaactctactctgctgggatggccccaatcaactgcaaactcaaacagctgatgtttgtccagcctgtgccctgtgccaggagtggggctgaacaccacctcatcacatgggcttcttctgcattttatgcatagggagatggaggctcagagcagccatgtgactagctcaaggccacacatccacgaagcccactcttagtgctccaggccctttcacttactcctccttcctggtctccagctctttgagagcagagaagccaggcagatggcttcttttccttctctcttccctagaaccccgtatttagccagtggtcagtggagatgacctccgggacctcatccttaaccccttcctgggtctcagctacccccaccctttgtctctgtcccctgcagccactggaggggtccctctcaaacttcactctatgtggatctctgcattttccaaagtgcttctagtaagctcccccttggccagaattactggcaaaacaaaattcatatccctaaaaaataggctttcatgctgcgttaattatgaataaaaaattaataaaataagctcttcctcagaagtaaaaaagattaaagacacaaataaatataaatatttttttttaaaagttctaggagctgggagaatggcttgagcccaggagtttgagaccagcctgggcaacatagtgagaccctgtctctaaaaaaatgaaaaaaaaaaattagctgggtgtggtggcacgtgtctgtagtcccaactacccaggaggctgaggcaggaggatggcttgagcccaggagtcaccccagcctggatgacagagtgagaccaatcaactaacagggggcacctcccctactcaagcaccatccatggctccccactgcccaccagatcaagatccagccattcaaactggccttcacagtcaactcctgcatccctccagcctccacacctctcacactccaaggccagggaaagccatctgctaagtcacaccctccagtttctctgtgcttgagctctaccccctctcctgcacttgttgaaatccaacctctccatgcagtcccagctcaagtgtcacatcctccacgtcgccttccctgacctcatgtctgcctcctccaagcagcaaaacttcaattacttgtgtctcctcttcttcaccaggagacatgccccacacctcccacgccctctttccaagggcccagcaccaaatgagagcgtattcttagaaaaaagagggataaggaagtcttctaagtttaccacctgctggggcaagtggagattcttgtcttctcatctgtctgcccacgtgctaaggtcagccacacatccacccaccgactccggaggacagacacatccagaggcggagctgactctgtctccacacatctggagtagacgggttggccaaggacaacatcctggtcagagggtcaaggtgtctggcagtgggtggggaggagtggcggagggcgggttggcggggagcagaaccagtctggtgctgcttgttgaggttggaggtcttcctggaggaagaggctgcagagcctccaggggtgggtgccggggaagcttaggcccaggatccagagagaggggaagggctggttcccaagggctggtggagccagagaattcctgagggccccagaggaggcttctcgggggggtcagtggggccccagggggtgatggtttagagatcgctgtccaagcttgggagcaaacctggaagtaagggccatggggggtgttggtgtgggaggagtgtggtccagagcgggacttgggcgctaatgcggcccagcagtggcaggagggcggggagcctgatggtttgggacttctaggtgtccaagtctctgtctctcttcatctctccatctcagtctcagtctctctctctttccatcgctctccacccctccacacgcctatttcttgttctctccttttctagggggcagcgctggagtccccgcccagaaccctgcgggagcccggggcgggatgtccgggggcggacccctcggcacggccgggcggggttaaagggttgggccgtgggacggcgcggtcagatcccaggtagtggcgccggtggatccggatcgagggcaggaggctgagacccgcgggtgagtgcgcgcgtggtgagggctgtaacctgagcgcggccgcggcgctgcgctggaacccgaggctcgcgcggttcggtgctggcggggcaagggcgaaggtctgcgcgcggcggcgggcggggcgcagccggccacggggacccccccaggacccaggacggggctgcatgcccggggcactcgtggggagaggggcacgtgggtgtgtccccgacgtttgctgcatttgtgagttgttttctttttttttttttctgtgtgcgcctcggagtcctaggcgcatccttttctctgggtatctgtgatgggcagggggcctccaaaagacccctctggtagtcaggacatcccagatgggttcaagccccgccctgggacgcctctttggggctgaatggggattcgccctgagatttcaccactgcacgttgtcttgacggggaggttgtagtacattcaaccgatggggttaggcttgtggttcaactgctatcaggaaccctctgcccatccatgccagacgcagagcccctctatgaaaagacggtgttcttctggccccgagagttggctctgagggttgtgtgaggtcctggggttggtcccaggtgatcttcgtctgatagatgctggaaggaagatgttttctggcctcccaggggcctggcccagcctgggtatgcaagttggccgaggctggccacctggggagtcgcaggctggagaggcctaggctcagggcatctctcctggttcatctgcccgctcacagctcattcatgcactcattgtgagtctcaccgccctgtaggcaaaggagatggccagggctggctgcgtacccgaaattcctcctaccctgtgccccttgctccaccccttatttctaggtcctggagctgtgcccagccagggctggcagcatcaaactccttcttgtgtaactccaaaccccaaagagaaggaacctccccaaatcttccctaccaccctcattttacaggcacggaaactgagggccagagagaagaagcctgtgcctgtggatacccagtgcccagtgggagagctgggatttgaaaaaacaagccctgtttgaccccaaagcctcagtccactttccgatgtccccggcatcaccaaatggcccagcttgggtttctgaacagtaacattaactctggcctggtgtctggcggtgacccaggttggtatctgcagaggggcttggatgacttgagaggcattcagggaatgggacccatctctccttccttccttccttccttccttccttccttccttccttccttccttcctttctttctttccttccttctttctttctttctttctttcttttctctgtctctctctctttctttctttctttctttttttgttgttgttgttgagacagggtctcactttgtcacccaggcaggagtgcagtggcataatcatagctcactgcagcctcgatctcctgggttcaagcaatcctcctacctcagcctcctgagtatggaggactacaggcatgcaccaccactcctgtctactttttgtatttttggtagggatggggtttcaccatgttgcccaggctggtcttgaactcttgggctcaagtgatccacccgcctcagcctcccaaagtgctgggattacaggcatgagccactgcgcctgactcatctctccttgttgataaaacttggacctgattctccaaaccccagatggccaggtcacaataatgaacgtgatggcagcaccaacggtaatgagagatatcattgatcaaaggcttactatgtgcctggaagattgcagccccatgaggtgggtaaatagggcttctgtcttaatggatgaagaaattgaggctcagagaggtgcagacactcacccgaggtcgcacagcaaagaggcagacctttatagaatcttttctgaggctcatgtccaggtgtggccacacttgggatggtgggcagaaacaattacaaccctgcaatggtctagattattagtggttttaaaacttctttttctgccaggatcccctttgggccaaggaaattattagcaaaaggtttgaatatgatcaaagctgcgataggactgtctcctttaccacatttgccaacttggccctgccctcattagtcataaatgactctgaagctctttctcagaaccttagaaatttagagtgctgagtggagactgaagacctagaagccaggctgagtgtggtggctcatgcctgtaatcccagcactttgggaggctaaggctggaggatggtttgagcccaggactttgagaccagcctggggaatatagggataccatatatatatatatatatatatttttttttttttttttgagatggagttttgctcttgttgcccaggctggagtgtaatggcgtgatcttggctcactgcaacccctgcctcccgggttcaagctgttctcttgcctcagcctcctgagtagctgagactacaggcatgtgccaccatgcctggctaattttgtatttttagtagagatggggtttctccatgttggtcaggctggtctcgaactcccgacctcaggtgatcctccctcctcccaaagtgctgagattacaggcatgattacaggcatgagccaccgcgcccagcactatattaattttttttaacaaaaaaattaaaaaaaaattagctgagcatggtggcaggcgcctgtagtcccagctactcaggatgctgaggtgggaggatcactcaagcccaggacggggaggttgcagtgagccaagatcacaccactgcactccagcctgaaggacacagcaagaccatgtctaaaaaacaaaacaaacaaacaacaacaacaacaaaacaacttagaagtcccctctcagctccagccttctggggtctggcactttgggggaatatgtgagtctctggggtaagccagccctctgatgttgaggaagccaaggtggcaccatgaatcagtggggacgggggcaggctgccttgactacaggcttggagtgaaaaggagggctgggatttggggtgatggggccagcgttggggtgctcttccatcaggctcctggctggtcccagcccctgcagttcaagaagaggcatgtatctcgtacctggcgtcggcctgggtccgtgccctccactccttcttgggagcccacacaccttgtataacaagtcctcagtgggtgaacggctgggccaacctgacaaaccagcgcgacctgggcgtgggccgggacacggagccagtcgctggctttcaccaccaccagataatgcgggccctggcagggcagggccacctctaccaaggcgggcctgctggatgagatcgggggccggtgtagatagggagtggacatgccagccgcccacaacattctgagggtgtcacctttgaattgctctcacttctatcaaatagcaataataggagtagtcatcatggctaacattttgtgagctacgtgacaaggcctttccatgcctcatttcactgagccgtcccaaaaaccttagggggtaggtcctgttattatcaacccatttcacagattggcaaagggaggctgatggcagggactgggttcacccaaggctgctaacctagggaataggagagctgagatttgaacccaggcctgttgaagtcaaaagtgaacattaaattaaattaaattaattttagtttttgagatagagtctcactctgtcccccaggctggagtgcagtggcaagattttggctcattgcaacctctgcctcagcctcccaagtagctggggctacaggcatccaccaccatgcccagctatttctttttttcttggtagagacagggtttcatcatgttgcccaggttggtcttaaattcctgacctcaagtgatcctccctcctcagcctcccaaagtgctgggattacaggcatgagccaccatgcctggcctgatttttttgttttttagtagagacggagtctcactatgttgcacaggctggtctcaaattccttggttcaagtgatcctcccatcttggcctcccaaagtgctgggattacgggcatgagccacttcacctggctgatacctttcctccattatctaaactccatagtttacattaggattcactctttgtgtcatgcagtaaactaatgaatttttataattgattcaattttttttgaatgggtgacatgtgctcatggtataggaaaccaaaacgactggaaaagtggatagtaaacttaagtttcccttccacccctgtcccgagttctttcaggccctttccagaggctgccaccatttttcctgggtcctcaaagcttttctctctctctctctctctcttttttgtattaccatttattggtgacaaacactaagttttactcgcattccatgaggagaaaaactccagtgtaaacgatgaatggaggcagtacttaactcgcaggggtaccaggctttccatatggaccacacacagagcctcagtgcacacacttcttttttcatttttatttttttgagacggaatctcgctttgtgacccaggctggagtgcagtggcatgttctcggctcactgcaacctctgcctcccgagttcaagcgattctcctgcctcagcctcctgagtagctgggactacaggcgaatgctgccacgccctgctaattttttgtatatatatatatttttttttttttttttttttgagacagagtctcactctgtcaccgaggctggagtgcagtggcgcgatctcggctcactgcaaactccgcctcccgggttcacgccattcttcagcctcagcctcccgagtagctgggactacaggcgcccgccacctcgcccggctaattttttttatttttagtagagacggggtttcaccgtgttagctaggatggtctcgatctcctgacctcgtgatctgcccgcctcggcctcccaaagtgctgggattacaagcgtgagccaccacgcccagcctaatttttttgtattttagtagagatggtgtttcaccgtgttgtccaggctggttgcgaactcctgagctcaggcaatccgcacccccctcggtctcccaaagtgctgggattacaggcgtgagccaccgcacccggcccagtgcacacacttctgtgtatagtaacacaacatcaaaagcaacacaactgtataaagaaacataggtcatacttttcagccctaatcgagatgtaattaatagtatcgagcactctggaaaatcagtctgcagttttatgtgaactatgtggagatcatatcctgtagtgtagtgaaagctaagtcctcaagagccgtatgtatagacacatgattttcttaaagaatatttaaaatggagatcaaagttcatttgtttaagtcctgtttgcattaacaaaaataaaaataaaataaaaatggaagcaaatgatcatctaaagtttaaaattcctaaattgtccaatttatacaactgtgggagacttattcaaggtttttgaaagtccaggactgtttcagctgaaccatagggcacgtaatttgcatcactgaaatggtgctgggttagtcaatgaaataaaaatgtctaactacatacacgtggatatgatctttgtcggttagattattgataaagtcagtctcagaaaagtttccaaactgtgcgatataattagatacagttgagaaactctcaaatgaaaattttatatagtgtcgtcgggcacggtggctcatgccagtaatcccagcactttgggaggccgaggcgggtggatcacgaggtcaggagttcaagaccagcctggccaagatggtgaaaccccgtctctattaaaagtacaaaaactagctgggtgtggtggcccagctactcgggaggctgaggcagacaattgcttgaacctgggaggcagaagttgcagggagccaagactgtgccgttgcactccagcctgggtgacagagtgagactttgtcttgaaagaaagaaagaaagaaaaagaaagaaagaaagaaggaaggaaggcaggaaggaggaaaattttatatagtgtcataccaataaaaaggaaataatgaaactaagaatacagatcactgttggaagagaaagcagtggtgatggtgtgggcactgcaggaagtggtggggccgtggcacactagaagttaggtcatgctgaataggaagcatttgactttctctggtgcttttagctctggggctggttgaaggcctctctctggtgtggctgtccagggtttgtcccaactaagccagcttgagaaggggtcatgctttcagtttcttctttcacacgggaaaaaaaagaccaaacaggaaggtgcccagggcgtggatctgctggtgccccaggagagccagctggctgggcagcccttcttccccaaaggcagctggtattgcgtagggacagccaggtcaccgagtggccgtcacaacaaaccccagcacagtccagcccggccacagccacctcccctgttgtgttccctgctgctgcccacatcctttacccaccgtctctcggcccactagaggtatcagaaattccaaattttcaaagcagttttaatattttcagtgtatatgttgggattttataatggttcatggccagaaaaggttcagcacctcccacacacagacattgatccatttcctgttcttggcatctctgtactttgttggtccaactcagacagcaactttaaggtgttcagtgcagctggccaggcacggtggctcacgcttgcaatcccagcactttgggaggccgaggtggatggttcgcctgaggtcaggagttcaagaccagcctggccaatatggtgacaccccgtctctactaaaaagtacaaaaattagccaggtgtggtggcgcatgccggtaatcttagctacccaggaggctgaggcaggagaattgctggaacccgggaggcaaaggctgcagtgagctgagatagcaccactgtactccagcctgggcaacagagcgagactctgtcttttttttattttcttttgagatggagtctcgccctgtcacccaggctggagggcagtggcgcgatctcggctcactgcaagctctgcctcctgggttcacgccattctcctgcctcagcctcctgagtagctgggactacaggcgcccgccaccacgtccggctaattttttgtatttttagtagagatggggtttcaccatgttagccaggatggtcttgatctcctgacctcgtgatctgcccgcctcagcctcccaaagtgctgggattacaggcatgagtcaccgcgcccggtcgagactcggtcttgaaaaataaaaaagaaaaagaaaaagatgtttagtgcagccatatcatagcaggactcaacatccttgccaatactatgtgttagatataagagaataagtacattctatgtctttgtactttaaccaagatatttgtactagacatgctcacaggcacatagtacattctacgtccttgtactttaaccaagatatctgtgctggatgtgctcacaggcatgtcccagctcgcagcccatgccctttccttatttggaaatattattgcttttctaagtccttttgtaagcaacttcctcttttcctttgctctctattgcctttacctatttaggaaagttttaaattattagccagtcaggtttaatttagattgtgaggtcttgcttcagccaatggagacaggacacagtagcaaggacaaactgcataagggataaaaattgcttccctcctttgttcaggtgtgctctcgccattattccatctgcaaggagcaccctttatgcagaaagtaaaattgccttgctgagaaaacttattatctgaatgctgatttttacttgcagtaccgaggaacaagcattctatttctgaataaacattttacttataacactatggctgatcagaggcggctgagaggagcaatggataagagatacaaattcattcttgttgtttttggggaagtctttgtattcaacctggaatccctggactctggaaagatagtccacttgctcagaggatctcatgagaggtccatggggtacgtggcctgaagagatgttattctttttttttttttttttttgagacggagtctgttgccaggctggagtgcagtggcacgatcttggctcactgcaacctctgactacctggttcaagcgattctcctgcctcagcctcccaagcaactgggattacaggcacgcatggctgattttttgtattatcagtagagaaggggttttgccatgttggccaggctggtcttgaactcctgacctcaggcaatccgcccacctcagcctcccaaagtgctgggattacaagtgtgagccaccgtgcccgacctcaaatgataattctagggtttccccacagtggctgcactatttttttttgtgggtgccagacagaagtgttcttgtttgagggacaggaggaccccagctgtggaaagtataggacttccccaatgtacctttcatggtggtcttcccatgggcatctggtggacctcttgtcatgattcccattttgtagtggagaaactggaggcttccagagagtgtcccaactggggactcacaacatgtggtcctgcctgggggcagagccaggggttgtttgtcctgggaaggacttcagcccatgtctggtagggggacggggaggtgaagcggacacagggctccacaactcccctctctcaccctccccaagcacccatctccccatgtacccagccacctggagcagggatccctctctagggctggcaccttctcttatcccaattctttcccatttcattcattccagaagacatttcctttgttgagatttcagctgggattttcctgggtgcgagttgggggctctagctgtgatttcactcagaagtcttccagctctctttaaggcttactgggaagatggagtgaatgatagtgaaaatcatcacacataacaggcactcaatgattctttggagagtgatctaggggaggtggctgattgtggtgcaaaggagtggaccatcagggcagagctggggttggaggatgaggagctggtgtgggcacagctgaggaaaggaatgtggatggagggaacagaatgtgcaaaggctctgagacgggaagttgcttggcctgtggaaggagtggcctggagcagcctgaggtgagcaagtgaggaggagggtggtgggagacagggctagaggcatcaacaggggtaagccatgtaggttgttgtggtccatgacaaaaagtctaaatttagctggatgaggtgactcatgcctagaatcccagcactttggaaagctgaggtgggaggattgtctgagaccaggagttcaagaccagcctggacaacatagccagaccccatctctaccaagaatttaaaaattagctgggcatggtggtgcatgcctgtagtcccagctactggggaagctgaggtaggaggatctctggagctcaagagtttgtggctgcagtgagctatgattgcaccactgcacttctgcctgggtgacacagcaagaccctgcctctaaaagaaaaaccgtgataaaaggccgggcacggtggctcacgcctgtaatcccagcactttgggaggccgaggcgggcggaacacgaggtcaggagatcgagaccatcctggctaacacggtgaaaccccatctctaccaaaaatacaaaaaaaaaaaaaaattacctgggcgtggtggcaggcgcctgtaatcccagctactcaggaggctgaggcaggagaatagtgtgaacccggggagcggagtttgcagtgagccgagatcgcgccactgcactccagtctggcgacagaatgagactttgtctcaaaaaaaaaaaaaaaaaaaaaagaaacaaaacaaaacacagaaaaaaaaaaaaaagaaaaaccgtgaaaacaaaagagtctaaatttcatttagagcaaagtggggagccatgggagaattttgagcagggaaggttcatgatctgatttaatttgaggaagatccctctggctgtgtgtgcagaatggacttcttgcagggagaaaggatggaactcaggggaccagtgggaacgggccactgcagtgctggcctgctgtgggttgggatgatggggatggagaatgatgaatggattctgaagatgtttaggatggacaactagcaggacccggcaacagattggatgtggctgaaagggggaggaagagggtgaggtgaatctgagagtctaggagatgcccccagggggatgttcaggagctggctggacctggcagtgctggacactgagacatgggaattgcctttgagataggatttctgaaaccacgggaggggtgagatcctcaggatgtgggcacagaggaaaggggggacaacgtggctcttagaagccccaacatttacaaaccgggtgaagaaagacgggctcaaagcagactgagaatgggatttttttttttttttttgagacagagtctcactctgtcacccaggctggagtgcaatgatgcgacctcagctcactgcaacctctgcctcccacgctcaagcgattctcctgcctcagcctcccgagtagctgggactacaggcgcccgccaccatgcctggttaatttttgtatttttagtagagatggggttttgccgtgttggccaggctggtctcgaactcctgacctcaagtgatccacccgccttggccttccaaagtgctgggattacagatgtgagccactgtgctcagccagaggaggggactttttgaggctgaagtggaggatgggcaggagtgagttcctgaagggctttggatgccaggctgaggggagtagggagccatgcagggtgttagagcataggagtcacaggctgttagaaaggggattgtggtggctggaatgggactgaactgcagccaggtggctcctgggggtggatgtgatgattcatgtgacccctgttggctgaatatgttgactccctctcagcacttttgggcctgccaagatggtaacacccaccccacacccactgaccgggctgcagacgaaaaggtcacactggtgtggacccagagatcatctttttatagtcaccccgaggtacaaacagggaaactgaggaccaggccacatagccaattggtgaggaggcagacatagaatccagatgttcatcgtgtatgtttgtgtctgtgtgtgtgtgcgcgtgcacaagtacatgcatgcatttaaaaagaaagtctcagcccggcgtggtggctcaagcctgtaatcccagcactttgggaggccgaggcgagcagatcacgaagtcagcagatcgagaccatcctggttaacacggtgaaaccccgtctctactaaaaatacaaaaaaaattagctgggcgtggtggtgggcgcctatagtcccagctactcaggaggctgaggcaggagaatggcatgaacccgggaggaggagcttgcagtgagctgagatcgcgccactgtactccagcctgggcgacagagcaagcctccatctcaaaaaaaaaaaaaaaacaaaaactaaaaaaagaaagtctctttccctttttttgctgtttttttttttgagacggagttttgctcttgtcaccatttattggtgacaaacactaagttttacttgcattccatgaggagaaaaactccagcgtaaacaatgaatggaggcaatacttcactcacaggggtaccaggctttccatacggaccacacacagagcctcagtgcacacacttcttttttcatttttatttttttgagatggaatctcgctctgtcacccaggctggagtgcagtggcacgatctcggctcactgcaacctccgcctcccaagttcaagcgattttcctgcctcagcctcccgagtagcgggtactacaggcgaatgctgccatgccctgctaatattttgttttgtttttttgttttttttttttgagacagagtctcgctctgtcgccaggctggagtgcagtggcacgatctcggctcactgcaacctccgcctcctgggttcgagcaattctcctgcctcagcctcctgagtagctgggattacaggtgcccgccaccacacctgactaattttttgtatttttagtagagacggggtttcaccatgttaaccagcatggtttcgatttcctgacctcatgatctgcctgccttggcctcccaaagtgctgggattacaagtgtgagccaccacgtccagctgtgattggcttatttcactgaacaggatgccctcaaggttcaaccctggtgtagcatgtgtcagaatgtccttgcttttgaaggccgaatagtattccattatgtggatggaccctattttgtttatacattcatttgttggtgggtacttgggttacttccaccttttttttttttttttttgagacggagtctcgctctgtcacccaggctggagtgcagtggttcgatctcagctcactgcaacctccgcctcccaggttcaagcgattcctgggcctcagcctccccattagctgtgattacaggtacctgccaccacacctggctaattttttgtatttttagtagagacggggtttcgccatgttggccaggctggcctcgaactcttgacctcaggtgagctgccccctcagcctcccaaagtgctgggagtacaggcatgagccaccccgcccagcctacttccacgttttagtgattatgacttgtgctgctctgaacatgagtgtgcaaatatctcttcgagacactgctttcaattctttgggggtatatccccagaagtagaatggatggattatagggtaattctatgtttaattttaattttttttaagatacaggatctccctatgtcacccaggctggggtgcagtcgcacgatcatagctcactgcagcctcgaacaactgggctcaagcaatcttcccatctcagcctctagagtagctgggatcacagacatgcaccaccatgctcagcttgtttaatcttaaaaggaaccaccagtggccgggcgtggtggctcacgcctgtaatcctagcactttgggaggtggaggtgggtggatggcctgaggtgaggagttcgagaccagcctggccagcatggtgaaactctgtctctgctaaaaatacaaaaattagcccagcatggtggcgggtgcctataatccaagctactcggtaggctgaggcatgagaattgcttgaacccaggaggcggaggttgcagtgagctgagactgtgccactgcactccagcctgggcaacaaaagcgaaactttgtctcagaaaaaaaaaaaaaaaaaaaggaaacaccatatggttttccccagtgcacaacagttccaatttgttcacatcctcaaccacacttattttctgtttttttgtttcagttgcaaccatcttaagactggtcatgtagtctgtattttaagtcataatatccatcccaattgggatctccaaatctgatgatgacccacccagctgttttcccaggaagtgttaactaataaaaatttcacttctgcagctgggcgaggtggctcacacctgtaaatctcagcacttgggaggcagaggtgggaggattgcttgagcctaggaatttgagatcagcctgggtaacgtcatgagactctgtctctacagaaaatagaaaaaattagctgggcatgatggtgtgcacctatagtcccagctactctggaggctgaggtgggaggattgcttcagcctgggaggttgaggctgcattgagccgtgatagtactctttagggtcactatttagcctgcgtgatagagtgagaccctgtctcaaaaagaaatttcacttctttatttttattatttttattttgtttcgagacggagtctcactctatcgcccaggctggagtgcagtggcacgatctcagctcacttcaacctccgcctcccaggttccagctattctcctgcctcagcctcccgagtagctgggattataggcgcacgccaccacgcccggctgatttttgtatttttagtagagatggggtttcaccatgttgtccaggctggtcttgaactcctgaactcaagtgatctgcccacctcggcctcccgaaatgttgggattacaggtgtgagccactgcacccggccaacaaatttcacttctgcatggaaaatgtggtttggcgttggctggcagaagacctaagtgaggcgtggtgtggtggctcatgcctgtaatcccagcactttgggaggctgaggtgggcggatcacttgaggtcaggagttcaagaccagcctggccaacatggtgaaaccccgtctctattaaaatacacaaaaaataattagctggatatggtggcaggtgcctgtaaccccagctacttgggaagctgaggtgggagaatcgcttgaacccaggaggcagaggctgcagtgagctgagatcgcaccaatgcacttcagcctgggcaacaagagcaagactctgtctccaaacaaaaaacaaaaaaactcacaacaagatcccatgagaactcactcactcactatctggaagacagcgccaaggggatggtgttaaccattcatgagaaaccagccccgtgatccaatcaccttccactagaccccatctccaacactggggattccagttcaacatgaggtttgggtggggacacagatccaaaccatatcagattctctgagatgaggctggtactgcccggagcatggtggtgcacggcagatgacaagcccttcctgcctgctcactgttttattaacattatggttacctgactgctttgttttggttccttaggagctggccctaaagcaaggacctgagtgcaagtaatttttttgggaagtaataacagaaaataccagcaaggaagaagacagtgaacccaaaagaattgaaaacaggtactcagataaatacatgtacacacatgttcagagtagcatatttcataatagccaaaatgtagaaacagcccaaatgtctgtccacagatgaatgaataaagaaaatgtggggccaggtgtggtggcatgcacctgtagtcccagctacccaggaggctgagacaggaggatcacatgaggctgggaggtcaaggctggagcgagtcgtgatcatgccactgcactccagcctgagtgacagaaccagaccctgtctcaaaagaaaaaaaaaaaaaaggaaatgtggaatatccatacaatggaatattactcagcagtacaaggaattaagctctgattgatgctacaatgtggatgaacctcaaaaacaggatgccgagtgaaggaagccagacacaaaaggctgcatagcatttaatagatttatatgaaatatccagaatacttaaatccatagagacagaaagcagattagtggtgccaggggctccagggagggagaatgggaagtggctactaacagggatggggttttgttttggcataatgaaaatgttctgaaactagctgggtgaggtagctcatgcgtgtaatcccagcactttgggaggccaaggcgggaggatcgcttgagcccaggagttcgagaccagcctgggcaacatggcaaaatcctgtctctacaaaaaaatacaaaaattagctgggcctggtggcatgcacctgtagtcccagctacttgggaaactgaggtgggaggattgcttgagctggggaggttaaagctgcagtgagccgtgatcatgccactgcactccagctgggtgacagaggagaccttctttcaaaaagaaagaaagaaagaaggagagagagagagaaagaaagaaagaaagaaagagagagagaaagaaagaagtcctgaaactagatggaggtggtagttgcattatatgtaaatgtactcaatgccactgaattattccctttaaaataattaattttgtgttatgcgaatctcatctcaactgaaaaagaagaaaaagaaaaagaaagagggggaaaggacgtggccaatagggagtttccactgtgggcagctggagtttaatctcattggggaagcctagagtgagtgtggaacctatatctcagggtcattgcacccaaggggtgagggagctggggtatttatccaccaatgagcctcagtcattggttgagagctgctcctttgggaggggtgtcttggtttcccagcctgaccggctatgcctgggcagagaatgccctatggtagagaagtcaagagggtggccttgtaaaagtcaaggctgagagcatacgagcagggccccgagtgcatccatctgtccagctggttggagatcatggctgggggatgaagaggtatccttggtgtctggaactcacgtgtgctgggaaccttctgtgcactaggcacaccatgcattaccccatgggtcatcgtcttgtgcatggcaccgaccccctgaccctgtgtgtccccaggatgctgcccatcacagaccgcctgctgcacctcctggggctggagaagacggcgttccgcatatacgcggtgtccacccttctcctcttcctgctcttcttcctgttccgcctgctgctgcggttcctgaggctctgcaggagcttctacatcacctgccgccggctgcgctgcttcccccagcctccccggcgcaactggctgctgggccacctgggcatggtaagtgtggccaggcaggactgggctgggctgggctgggcatgtgcagggtaataggtagggatggtgggcctgctggcttcccacagcctcccaagaatctggttggggctagcagcagatttatatgatggggtatgaggctgaggctcagagagggcaagcagtttacccaaggtcacacaggtgggaggaggcagaactaactttaaagatgaattattttgggaggctgaggtgagaggattgcttgaggccaggagtttgagaccagcttgggaaacatagtgagaccccctctctacaaaaaattcaaaaattatatgggtgtggtggtgcacacttgtagtctcagccacttgggaggctgaggtaggaggattacttgagcttaggagttcgagaccagcctgggaaacacagtgagaccccatctctataagaaaaattacaaaaattagctgagtgcagtggcacacacctgtaatcccagctacttgggaggctgaggcgcgaggattgtttgagcctgggagtttgaggctgcagtgagctatgattgtgccaccgcattctagcctgggtgacctagggagaccctgtctctctaaggaaaaaaaaaagaactctctctataattttatagctatcactgtacaataggtacctttacctttggagtttggaatcccagggcagggttggaggaggagaggggaacacatcctattcccaatgtggttccactcttctcccttgaatgctgtggtcctaggtgaggactcttacccttttattgcattgaatttttttctttttgagacagggtctcgctatgttgcctaggctgatcttgaactcctaagctcaagcaatcctttggcctcagcctgctgagtcctttttaattttgcagatatgtgccaagtatttttccaggcaaatattaactcattcagttctcttgacaattctaggaagtaggtcccatgactagccccattttgcgtggaagattactgaggcacagagaggttaagtagctgaccttaggtcacacagcttgtaagtggcagagctggggttcaaacccagcctgtcaagctctagcctccttgatctcagttctaccctctgatgcctctagtttctgtagttagtttctagatgagataggctagacttttccttttttttttttttttcgagacagtctttctctgctacctaggctagagtgcagtggtacaatcatggctcactgcagcctctacctcctgggctcaagggatcctcctgcctcagcctcccaagtagctgcgactgcaagcctgcaagtgcatgcccccacgcctggctaatttttgtacttttagtagggacagggtttcaccgtgttggccagactgatctcaaacccctgacctcaagtgaaccaccgtgctcagcctccctgtttttagttctactctctgatgcctctactttctggatgagataggctggactttcccttttggacttttctccttcatttcttccatcccttacccctgctcaggccttaccctctactgctggtccatggtccagccccctccttgagttcctacctccagtttcatcccttcggtccgtctcccatcctggccccagagggattcttggattcaaccacatccctgcccctgcttacacaccctccatggctccctattgccattcagaaaaaggctggtgttcaaggcccttttggctccaacctccatcctcctcacttgttccaccatccctccctagctccatagaatcacttcccactcctgtaacaaggctcccacctccaaggcctttcccaaaactgtactctctgtccaggtatccttctctgctagatcaacttctgctcatttttcatgccccatctccagtgcccttactctagaaagccctctctgggtttgatggttgtcctagagggagtggccaggctctagtgcctggaggagttggccagggtcagctctaaagcccagccttgacgttgtcctgcccagctcctgggcccacgggggctgggtgaggctgcaattgagccctgggtgtggacatgatcaaggctgagcctgacggggaaggagacacaggagctggaaaggagtcatttgttggttgaatcatttggcaattgctgagccttatcactggctaggcactgggttaggctcctttgtagctgagctcttctctaattctcatagcctgtgaagtggggatggatctgtcctatttcatggattcacacttttatggatttgagcacagagaggttaagtggcttgctcaaagtcacacagccgctgagggtgggtttgaacttggatttttctgacgttgagcctgaagctttcctgcctcatacagcaggtgaggaagtgcagttttgtagctaggtggcctgggttcaggtactagctttgcagatgatgccaaagcttgcccatattcctctcaacccatttttggatgcagtggcctgacgtccagctgccagctcctgcattctaggggctgtctctggtggctggagcccactctgcaagtgaaataaaggctgggcacagtggctcacacctgcaatcccagcacgttgggaggccaaggcaggagaattgcttgagcccgggagtttgagaccagcttgggcaacatagcaagacccagtttttacaaaaaaattaaaaattagccaggcttggtggtgcatacctagagtcccagtgcctgtcctgccactgtcgcttctgtgagcttgggaattaacgcccccaggagtgaccctcaaccaatgactgatgggcattggtgtataaatacctcagctcccttgccctcaggtggagtgactctgaggtgcaatgcgctactctgccctccaaagctccccagtgggaccgagccctggttgcccttggtggtaatttccttgacaactcatcctttactggtggtcttcttcccctatctcatgacccatgtttttggggatcatgccccaaataaactacctgccctagaacccttgtctcaggacttccttctgggggagcctcaaccagaacagtcacctacttaacttgcaacttcagaaaaaccattcgaccttgctgaacaaaataaaatgaggaaaataatagcaacggtctcatagggttcttgtactgatcaaatatgccagtacatgaaaagtctccaccacagtgaccaacacagtgcaggcacctgtatgtggtaaagatagcaacagtagtaatatcttattactcacatagcaagtacttgataaatgccaaccatgatcattattgtgtttatcattactatttttatttttattttttaagagacagggtcttgctctgtcacccaggttggagtgcagtggggtgatcatagctcactgcagccttgacatcccaagctcaggtggtcctcctgcctcagcctcatgagtagctgtgactacaggcatgtcccaccaagcctggctaattttatcttcttattttattttattttttttttttgaggtggagttttgctcttgtcgtccaggctggagtgcaatggcatgatctcggctcactgcaacctctgcctcctgggttcaagcgattctcctgtctcagtctcctgagtagctgggattacaggcgcccaccaccaagcccagctaatttttgtatttttagtagagatggcctttcaccatgttgtccagcctggtctcgaactcctgacctcaggtgatctgcttgccttggcctcctgaagtgctgggattacagatgtgagccactacacttggctactatttttagctattgaacatcagccatgggtcaggcccatgctggggctcttgctttgttatttcatgaatcctttctactgccctcagagggagagttgattctcctccattttttcagatgaggaaatggaggcccagggaggtgcagccaactgcctgaaatcataatgtagcactattgggcttgttttgagactacaggaggtggcaggaggaaggcagtgggggaagctggggctgggtacctcctcattgctcctcccttacctcttgcagtaccttccaaatgaggcgggccttcaagatgagaagaaggtactggacaacatgcaccatgtactcttggtatggatgggacctgtcctgccgctgttggttctggtgcaccctgattacatcaaaccccttttgggagcctcaggtacgtgggctgggcctccgatctatggttgagtcctcaactcccagagcctatctgagattctaggcaggtgggatatccagaggaagggtcatttgaatagggctttgaaggatgaataagagtttggcaaagcaagcatggcaatccagattgtgagaacagtatgggcaaagatgtggcaatgactaagagttccagaaacttcgagggaatgtccatccatctggcagtcagagccaggcacgtttggataggcagttgttccttatggttttgttaagtaagtgttactcaatccctggccgtggcacgcccatcatttggttctgacattcccattatggccaggactcttggtgactcagcctgcagcctgctgtcatcacttgggctgactctgactggcagggagggagatgtggaagaattccttcttcctcgtgcagtccacacctatcccaagatgtgagacttccaagtctgcttggcaagctcttgctcagccttcaacacccagctccaatggccgcctcctccaggaatctttccctggcttcccagacagacctattctcagtcctaaccctttggacctgggtatgtctgtgtccagctctatcttcctcatgagcgggactctggatcctcagtgtggccttgtgtacctggtgtattagtcagttctcacgctgctatgaaggactaccctagactgggtaatttataaaggaaagaggtttaattgactcacagttccgcagggctggggaggcctcagaaaacttacaatcatggcggaaggggaagcaaacacgtccttcttcacatggcagcaggaaggagaagtgccaagtaaaagggggaaattcgttaaatctcgtgagaactcattcactatcatgggaacagcaacatgggggtaaccgcccccatgattcaattaccccccaccggatccctcgcatgacacatagggattatcggaattataattcaaaatgaaatttagatgggacacagccaaaccatattacctgggcacctccagaggtatcgggacatctgagagaactcactctcaaatgaaccaatgagctccagtaggtcaggcatggtggttcacatctgtaatcccaacactttgggaagctgaggcaggagggttgcttgaggccaggagtttgagactagcctgggcaacacagcaagaccctgtctctcgaaaaaaataaataattacccagtggcagtgatgtgcacctgtagtctcggctacttgggtggctgagatgggaggatcacttgagctcaggagtttaagaccagcctgggtaatctagcaagaccccatctgtacaaaagcatttaaaaatattagctgggtgttgtggtgcatgcctgcagtcccagctactcaggaggctgaggtgagaggattgcttgagcccagcagatggaggctgcagtgagctatgattgcaccactgctgtactccagcctgggtgacagagcaaggcttagtctcttaaaaaaaaaaaaaaagtgggagattccaggaattttaggatctctgtcccagctttgcctctacaaacacgcatctggggaccatctccagggctgccacccaggagctgtgaaagaagctgccatcttccccttccacagctattccctctcaatgccttgttgtctcccgttattacatttgtgaagggatgacgatccctgttgaactaaggggaaaacctagaccttgggagggagaattgactcttctgagggatgaataccaacttgtgggaagagccctgggccaggactgaggtgggttggcttcaaattctggccttggcacatgcttgctgtgagaccccagccatttatctagcctctctggatctcaggttttgatctgtaaaatgggtgcagttgtgaagcctgaataatataatgtggataagaggccacgtgcagtgactcatgcctgcagtctcagcactttgggaggccacggcaggaggatcacttgagcccaggagttcaagaccagcctgggcaacagagcaagactctatctttacaaaaaatttaaaaaattagccaggtgtggtggtgcgtgcctatagtcccagctacttaggaggctgaggtaggaggattgcttgagtccaagaggttgaggctgcagagagctatgattgtgccattgcatccagcatgggcaacagagtgagattctgtctctaaaaaaattaaaaaaaaaataatatggataggcattagtaagggtttctcttctgcctttttaatatatgtttttctttctcttttcctcctttcctttcttcttcctccctcttctcctcctccttctacttctctctctactcctctttccccctcctcccttctcttcttctttctctcctcctccttctacttctttcttcttctccttctcctccttctccttcttctcctccccatccccctcctcctcctccaccttcttctttttcttcctcttctttttagacagagtctcactctgtcacccaggctggagtgcagtggcatgatctcagctcactgcaacctctgcctcccgagttcaagtgattctcctgtctcagcctcccgagtagctgagactacaagtgtgcaccaccacacctggctaatttttgtatttttttttttcagtagagacggggctgcaccatattggccaggctggtcttgaactcctgaccttaagtgattctcctgccttggcctctcaaagtgctgggattacaggcgtgagctacagcgcctggtctctcttttttctccttcctcctcccttctcctccccctcagagcatcagtttcctgagcaccatcctgcctggttctgagactccaaacagaccgaggagtagtgccccagcaggggctgtcatgtagtagatgcttaagcctcttgccctcccctcatccagtggagggaggggatattctgtgtaccccatcagagaagccagatagggaactccaggatggaaaaaagggtggtgctgtgagtcagcctggagtgaggcctcttggccccagggtgcccccacctggaattacacagatcaggctccagtcacagacaccaccctggatcaggacctcctggggccacacctgggagtggcttgctgttctgagcttggagctgcacagcccttgagcctggaggagggcccagctcctgttggagcttcagtttccccatcatcttatgggcctttggactaggaaattttaatgagagaaagtagataaacatgctttatagagaacatgatgatatatagacatataattgtagcttgcttttatatcatctttttaaaatggaggtgaaattcatgtaacatataattaaccatttacaagtgaacaatcagtggtatttagtgtattcaccatgttgggcaaccaccagcattttccagtttcaaaatttttagtcacctcataaaaaaactctgtacccattgagtaatcacttcccatttccctcctcctcccatccgctggtaacctcgaatctgctttctgtctctatgtatttgcctattctgggtacatcatagaaagagaaccacataaaatgtgatctttttgtgtctgttttcttttactcagcataatgtttttgaagttcattcacgttgtagtaggaatcagtttcattcttttttttttttttttttttttgagacagggtcttaccctgtcacccagaggctggagtgcagtggtgtagccataactcattacagccttgaaatcctgggctcgagtgattctcctcctgcctcagcctcccgagtagctggaactgcaggcacgcaccaccatgcccagctaatttttatttttatttttgtagagatggggtcttgctatgttgtccaggttggtcattagggctgaattcatttcactgtatggatttttttttgtttacccattcaccttttggatgttgtgaatcatgctactatgaacatatgtgttcaagttttggggtggacatatgttttcatttctctcttgggtagatacctaggagtagaattgccaagtcatatggaattctgtacttaactttttaaggagccaccttgctgttttccacagagggtgtgcattaattttctactaacaggaaacacaactatttatctcacaagttcttgatgccaataaataatcattttaaccatagtaataaaaatagccaacagttggtcaattattcatttacctacgcacgtatttaatgagcatctaccatgtgccaggaacacaagagcttgttgagtcttatagggatgccatgaggcaagattgttctattttctcctttggcagtggtaacatgtccaggcttacatatctagttagtggcagggctgggatttgaactcagacctggctggcccagaacccaagctctcaaacatagtgatatgcagctttctgagcatgagtttctccatgctggcaccatgtgggggtatttcgtacaccgtctcatccatggtaggcattaccatctctccctctttttttttttctttttaaaaaacatttttgtagagacagagtcttgctgtgttgcccaggctggtcttgaacttctgggctcaagtgatcctcctgcctctgcctcccaaagtgctaggactgcaggtgtgaatcattgcacctggcctaccatctcctttttgctggaggggaaaactggtgaggagcgtggacacagactttcctggcattgtggtcagagttggagtggaaaaggaacctgaggatgagagaacaatggttcagctgagaagggggtttggagaaggcttcctggagtaggtgtcagtgaagctgggccccgaaggatgcctaggagcttgccagagaaggagtcccagatggaaggtcctgccagtgccttgatgcagatgtgtgaaaattccaggggaattcaggtgatttagggtggctggagtgaaggtgatatgttggggggaataggaaatgagactgacagttaagcaggaactggacagcaaagtgaatgaacttgtactttatcctgggagtgatagggagccacgggaagtatttgaacaagacagctattgaccagatcctggtgtcagaaagatccctgtggagcctatcttggagtccagagtgcagagaggagaggagtgactagactcctgctttcctcttcaatgctgcctcctccaggaagcctgccctgacttccaacagccctttttctgagccttccttagcacctagcacactttctaccttcttggtaattgcatggtgtgtctctgcttccctttcctgccccactcaggagctcctccagggagggcatagagctgagccatctgtgggtccccagcatcacccagcttgggttgggcacagaaaggcagcataagaggtgtgatgaatggggggatgagtgggcggatgattgtgtaggcaattggccaattcctagggattgtgtcggtgtaggtggctgagtcgcattcaggtaaaagtgatatcactcgaatttcagatacttccttcctgggcctctgcccattcagccccaaatctgttcagtatatagaaggaggatccatccattcatccatccactcattcattcattcatccatccaccttccacctatccactcattcatccatccatccactcatccatccatccaccatccacccatccatccattcatccatccatccatccacccacccaccatctatccatctgctattcatccatccacttatttatccatccatgtactcatctgtccctctactcatccatccacccatttattctttcattcatccatccttggattgacttatttattcatttaataaaaatttatctagcacaacatatcagtaatcaacacgaaccctcctgttaaggggcttgtaactaagtggatacaatccagagtgactgctgggtcaggggtggggagaagcattcaagttctcatacaggatgagggaagagtgtttggggcagagagaacagctggtggaaagtctcagagaagagagagcacgtggtctttttaaggagctgagaaaagttctgtggtgtggccgggcatggtggcttatgcctgtagtcccagcactttgggaggctgaacttggaggatcacttgagctcaggagttcaagaccagcctgggcaatatggcgataccctgtccatacacaaaattaaaaaattagccaggcatggtggcgtatgcctgtagtcccagctactcgggaggctgaggtgggaggatcgcttgaatccaggaattggaggcagcagtgagctatgatctcaccacacaccccagcctgggtgacagagtgagaccccatctcaaaaaaacaaaaaacaaaaagttatgtggtgttagttctgtgacgtcgaatagggggtggaagacagaggtgtcttgagagagatttggacaaaggcaaatgattcagggctttgaaaatgggctggtatgtgagggtgatgggtgtgtgagcaggaaggggcgtggtcagatctgatagtcagatgagattctcctggggccattcatgagggacacactggagagggtgaggctggaggctgggagcacaggaggtgtgattcagatggcctgagctggcagaaaataagggggtggattaggggaagactcaggtgaagaagtccattctggatagacagctcaacctggtcaaaggttcagaggtgatccacagcaggcgatgagaatagggttatctggtgtatgttgaaggatgaggtggtgggagaggcatacaggggccagatggaattgggtttcaatgccaggctgagcctgaactttttacaagtgcaatggggagccatgggaggtgtctgagcaggggaggctcatgttcagatcagtgttttataaggattttttctcgggtaggtgtggaggacggactgggtgaatacagtgggaggttggagcccagtgaggaggactaaggaagtcataagcaaaggtcaagggttggaactctgttttgaggccaggcacgatggctcgtgcttgtaatcccagcactttgggaggctgaggtgggtggatcacttgaggttaggagttcgagaccagcctggccaacatggtgaaactctgtctctgctaaaaatacaaacaaattagccgggcatggtggcggacacctgtaatcccagctactcaggaggcagaggcaggaaaactgcttgaacctgggaggcggaggttgcagtgagtggagatcgcaccactgcactccagcctggatgacagagcaagactccgtaaaaaaaaacaaaaaaccaaaaaactctgttttgagtcaccattttccctttgccctccacagctgccatcgcccccaaggatgacctcttctatggcttcctaaaaccttggctaggtgagtgcccagtgggtaggctggggctggggctttagagaagagagggaagagcatggggttccttggaaggtttcagagtaacaggagaggtccctaacctcagtcttctgggcccaggggatgggctgctgctcagcaaaggtgacaagtggagccggcaccgtcgcctgctgacacccgccttccactttgacatcctgaagccttacatgaagatcttcaaccagagcgctgacattatgcatgtgagtcctaaggctttgagggaagagggtgtcttgggagtgaggctggtccaggctccaactcatgcatgggcaagccatgtgatgtcaggagccctcactgactttatctataaaatgagcttgtagtgaaaacgcagtcgggtccttgttaggctgactccctctctgtggtttccatgcacagtcaccatgtatctctcttccaggctaaatggcggcatctggcagagggctcagcggtctcccttgatatgtttgagcatatcagcctcatgaccctggacagtcttcagaaatgtgtcttcagctacaacagcaactgccaagagtgagtgtgacccttcttgggaagatggagccagctgctctaggagcaagatggtggcaggagaaagggaactcccaggcattagacaactctggcctatgggagctctgccacggatgggccatgtgcttccgggaaactgaccatctctctgagcttcacttttttttttaatcaaaaaaatgggcatcataattccttccccatagtcattgtgtgagaattaaatgagataatgtgaatcaatggcttggtataaagtaggtgcttagtaaatgttagtattttttcattccactaggaagagtatgtggtctttggacagtgtcctccccactttctgaggctcagtttccttgtttgtaaaaaaaggatgacaatctcttactttctgagagatgctttaaggataaaatgatgcagcactgccctggcacatagttgatgctcagagaatatttgttgagtaaatgaatcaaataaccaatgccttgcttcattaattcattcattcatcaaatattcattgtgcacctactacgtgcctggcaccatgatattgctgctgagaacagggtggtgaacaacagacagtcacagttctgtgaagtttatagtctaagtggggacataaggaataagggagataattaatgcaaaacttgcaacacatagtaggtcctcagtaacaagctaatgacttcgttactctaggcattataggggcacgttccagttggataaggcagagattgtcttagaaattaaataattaattcatccaagaaatatttactgagtgcctagtaagtgccaaccctgaactaggtgctgggaacaccatattcaacaagaaagacaagatgttgcttttctagagcttccattttagtaggaagacaggtaataaccatgaacaagtaaacaaacaagaaaacgacagactgcaataagtgcatgaaaacaagcccacttcaggactgaggacagctcccttcaagcctgcttcacctgttagtttttaaaaaataatggctttgttgagacacaattcacatactataccatttactcatttaaagaatacacctgaactgcttttagtatattcagagttgtgcaaccattactataatcaattttagaatattttcatcaatcctcccccaccccaagaaacttcatacactttagcaacccgtgcacttccctttctccttcaagtctaggcaatcactaatctattttctatctctatagatttgcctgttatggatatttcacacggatggaatcatacagacttttgtgtctggcttgtttcacccagcataatgttttaaaggctcatccatattgtggcatgtatcagttatgtatttcttttcattgatgaataatgttccatttaccacataataccacattttgtttatccagtcacccatcgatggacactgtttccacttttcgacctttatgaataatgctgctattaacattcatgcacaaagttttgtgtgaacatacatttttaattcttttggctatatacctaggagcagaattgctgggtcatacggtaattccattttaaacattttgaggaactgctaaactttatttcagtgggtttcaacatggtatgaagtggttgtaccattttgctctcccaaccagtgatgtatgagagctccagtttttccacatactcactaacacttgcttttttttgttgttgttgttttgtttgctttttagagataggatattgctctgttgctcaggctggagtgcagcccaacacttgttattataagttttgattttagtcaccttagtggggtgaagtagtatctcattgtggttttgatttgcatttctctggtgaccagtgctgttaagtatcttttcacattctcattggaaatttctgtcttctttggagaaatgcctattcatatccattgcccattttaaaataagttttaagaattctttatttattttaggtaccaatcccttatcagatagacaatttgcaaatattttctcccatgctgaggagtgtaaccatttagttttagtgatgctacaatgactatgcctatgttgaaagtctttatccctctttgggcctgttcaaaaatatacccgagactgggtgtggtggctcagacctgtaacccagcactttgggaggccaaggctggaggatcacttgagctcacgagttcaaggctgcagtgagctatgattgtgccactgtactgcagcctaggtgacagagcaagaccctatctaaaaaaataaataaatgaatttaaaaatagagttaatatagggcttctctttgttatctattcaatggggacaggaggcttatcttagccaagccagggctgtgctatgctaggggaaggggctacactcatggatccccttctccttggcaggaagatgagtgattatatctccgctatcattgaactgagcgctctgtctgtccggcgccagtatcgcttgcaccactacctcgacttcatttactaccgctcggcggatgggcggaggttccggcaggcctgtgacatggtgcaccacttcaccactgaagtcatccaggaacggcggcgggcactgcgtcagcagggggccgaggcctggcttaaggccaagcaggggaagaccttggactttattgatgtgctgctcctggccagggtgaggctgggccccctggaattgctggcctcccgagggctggcctcccgaggaattgcatgtaaaatgataagtgttaaaactccattaggcgtggtggctcacacgtgtaatcccagcgctttgggaggccaaggcgggaggatcgcttgagccctggaattggagatcagcctgggcaacacagggagaccctgtctctacaaaaaacaaataagttgggtgtggtgccgcatgcctatggtcccagctacttgggaggctgaagcaggagtctggcttgagcccaggagttggaagctgcagtgagctatgatggtgccactgcactccagcctgggcaacagaagcgagactctgtctcaaaacaaaacaaaacaatacacatgctcaaaacaaaaagaaattcacatgggtctgggatggggtcagaacatgtaagacttactgcgtgagttttcttgggctgctattacaaagtaccacaaactaaatggcctaaacatcagccatttattctctcacagttctggaagctagaagtccaagatcaaggtatctgcagggctggtttcttctaaggcccatgaaggatgaatctgttccaggccttgctccctggcttgcagaaggctgtcttctccctatgtctgcggatcatcttccctctgtgcctgtctctgtcttcgtctctttgtataaggattagggccctgccctaatgagttcattttgtcttgattacttctgcaaagacctctctccaaacacggtcatagcctgaggtactggaagttaggacttatgaattctagcggagggggggtgggcagggaaccattcagctcatcacaattgcaaaaatgaaatacatgaccttgggctgggcgtggtggctcatacctgtaatcccagcactctgggaggccaaggcaggtggatcacttgaggtcaggaattcgagaccagcctgaccaacatggagaaaccccatctctactaaaaatacaaaattagccgggcgtggtggcacacacctgtaatcccagctactcgggaggttgaggcaaaagaatcacttgaacctgggaggcggaggttgcggtgagctgagatcatgccattgcactcaagtgaaactccgtctcaaaaaaaaaaaaaaaaaagaaaaaaaagaaatacatgaccttgaagagatgagacacttctatggtcactcattggtgtgtctgtggaccttttgggttctggattcaaatagtcctggattccagtcctggctctgtcgcttagtggatgtttgaccttagtcattgactcttcttcccaagcctcagtttctccatttataccatggtgatcataaaacctgatcacaaggttgtcaggcatccagtgggatgcttggtgttggaggctgctcaagaaatatgaacttccttcttctcctcactgttgactttctgtccctctttacatctttcttttcttttttcttgttttttaaaaatgtaatttaaagttccaggataagccgggcgcagtggctcacccctgtaatcccagcactttgggaagctgaggtgggaggatcacctgaggtcaggagttcaagacgagcctggccaacatattgaaacaccgtctctactaaaaataaaaaaaaaatattagccgggcgtggtggcatgcatctgtaatcccagctcctctggaggctgaggcaggagaatcgcttgaaccctggaggcagaggttgtagtgagccaagattgcgccactgcactccaatctggcaacaagagagaaactccatctcaaaaaatttttttttaaattaaatggaaagttcaaggatacgtgtgtagggcgtgcaggtttgttacgtaggtaaacatgtgccatggtggtttactgcacctatcaactcatcacctaggtattaagccctgcatgcatttgctatttatcctgatattctccctcctcctgccaccctgataggccccccaagtgtgtgttgtttcccccctgtgtccgtgtgttttcattgttcagctcccacttataagtgggaacatgtggtgtttggttttctgttcctgccttaggttgctaaggatgatggcttccagctccattcaggtccctgcaaaggacataatcttgttcctttttatggctgcataatattgcatggtatatatgtaccacattttctttatccagtctttcattgatgggcatttgggttgattccatgtctttgttattgtcaatagtgctgcaatgaacatatgtgtgcgtgtatctttataatagaataatttatattcctttggttgtatacccggtaatgggattgctgggtcaagtggtatttctggttctaggtctttgaggaattgccacattgtcttccacaatggttgaactaatttacgttcccatcaaccttgtaaaagcgttcctatttctccacagcctcaccagcatctctcactcagggtcttgctctgtcacacaggctggggtgcagtgatgcggtcatggttcactgcagccttgatctcctgggcttaatcctcctgcctcagcttcaccagtagctgggactacaggcatgcatcaccacacctggctgattttttttttgtagaaatggggtcttaccatgttgcccaggctggtcttgaacgcctaggctcaagtgatcctcccaccttagctgcccaaagtgttgggattataggtgtgagccaccatgctgggcactttccatctttattagacaagttgcatacttccatcttcctggactagttccccccacagcttggcttaagagagagaggggagccaggcgtggtagctcatgtctgtaatcccagcactttgggaggatgaggcaggtagatcacttgaggccacgagttcgagaccggcctggccaatatggcaaaattgcatctctactaaaaatacaaaaattagcttggagtggtggcatgtgcctgtaatcccagctattcaggaggctgaggcacgagaatcacttgaacctgacagtcggaggctgcagttagccgagattgtgccaccgcactccagcctgggtgatagagcgagactccatctcagaaaaaaaaaaaaaaaaaaagatgggggcggggagatatctgagttttgaggagcccctaggatgcggagggtgggatgaagtgggctgagcaccctctactgcccattccaggatgaagatggaaaggaactgtcagacgaggatatccgagccgaagcagacaccttcatgtttgagggtgaggatgtggggtgaggctggaggagggcaggaagggacatcattgtctgtagacagcatctctgctttcttcaggcagcctccattcagataccctcatctccctgcaggtcacgacacaacatccagtgggatctcttggatgctgttcaatttggcaaagtatccggaataccaggagaaatgccgagaagagattcaggaagtcatgaaaggccgggagctggaggagctggagtggtgagtgtggggtcaggggaatggagggggcaggttgaggccagagccttgggtgtaagcctctgctctcccacttactgattgtgtgacctcagacaagccactttagcttcctgaattgcaatttcttcagctacaaaatgggggtggttatagtgcctatgcccacctcataatgcagaagttctcaaagtgtcctagtcagcaattattgcaatgatgctgcataatgaacagctcccaaacttagtggtttacagcaagcatttgtttcttgcttttgtatgcacacatttcttgctcttgtctgctcattactctaattgctgttggacttggctgagtggagtggagttgcttcaaaactaagagctgggttcagatctgcttcatatactccctttctgttctctttggaccagaggctaccctgggtcgtattcttctcaaggcagattccagaagcacaaaaagccatgaaatttaaaagctttgcttgggccgggtggggtggctcacgcctgtaatcccagcattttgggaggccgaggtgggtggatcacctgagatcaggagttcgagatcaacctggccaacatggtgaaaccccatctctactaaaaatacaaaaattagccaggtacggtcatgggtgcctgtaatcccccctactcgggaggctgagacaggagaatcacttgaacctgggaggtggagtttgcagtgagctgagattgcaccactgcactccagcctgggctacaagagtgaaactctgtccccacccccccacaaaaaaagataaaataagtaaataaataaaataaaaaaaaaaaacaaaagctgtgcttgcactagaagattgcattggctaaaacaagtcacgtgaccaagcccagcatgaatggggcaggacatatactccactcacctgagcagaaggcactgaagaatcatatgacaaagggtacaggtatataattctaattcagggaggaagtggagaatcagaacacatacccagtctctaccagattcatgctatgtagagctgattctgggtgatgaaaagaaaacacagcattaggctgggcgtggtggctcatgcctgtaattccagcactttgggaggccgaggggggtggattgcttgagctgaggtgtttgagaccagcctgggcaacatgacgaaaccctgtctctacaaaaaaatacaaaaattagctgggtggggtggcgcatgcctatagtcccagctacttgggaggctgaggtgggaggactgcttgaacccaggaggtggaggctgtggtgagtcaagattacgccactgcactccagcctgggtgacagagtgagaccctgtctcaaaaaaaaaaaaaaaaaaaaaaagaaaagaaaagaaaagaaaagaagaaaaacacagccgcaacattaaatagcatcaactcacacagtgaggaggttcctttcggttctatttcaaccttttgccttatggcctcagggggacatgctcagtggggtgctactgtgtcctgaacactttgctaatcttccttttaaacaagtggagaagatgtctcaggttgagagagttgggtgggagttggtgtgtagacacaatttaataacacactactgctttcacagtggtgtttgtatggatgaatacctttatgccagggatgctgtttgccctttatagcaacatgaagtttatttttttttaagacacaggctggagtgcagtggcataatcatagctcactgcagcctcaaactcctgggctcaggcaatcttcctgcctcagcctcctgagtaggtgggactataggagtgtgccaccacaactggctaatttttaacatttttttaagagatggggacttgctgtgttgcccaggctgctctcaaatccctgagtgcaagcagtcctcttactttggcctcccaaagtgctgggattataggtgtgagccactgtgcccagccataaagtttctttgaaagagaacctgggccaggtgcagtggctcatgcctgtaatcccagcactttgggaggctaaggcgggtggatcacttgaggccagaaattcaagaccaacctgggcaacatggtgaaaccctgtctctactaaaaatacaaaaattagctgggcgtattggtgtgtgcctgtaatcccagctgcttgagaagctgaggcgtgagaattgcttgaacctgggaagcagaggttgcagtgagctgagattgtgccactgcactcctgcctggatgaaacagcaagacgccatcaaaaaagaaagagaacctgctaatttaaagaaactaatctaatctagaacatgaaccaagagttatcattagcccaattttgggccctaaagtccaagggaaaaaatattaagtaaatgatattataaggagataatgcacttttcttttctttcttttttctttttttctttctttctttttttgagataggctctcacactgtggcccaggctggagtacagtggcatgatcatagctcactacagcctcctgagtagctgggaccacaggtgtgtgccatcatgcccagctaattttttaacttttggtagagatggggtctctctttgttgcccaggctggtcacgaactcctgggctcaagttatccacttgcttcggcctcccaaagtgctgggattacaggtatgagccaccatgcctggcctgcaccagttttttttttttttttttttttaagacaagagtctcactctgtcacccaggctagagtgtagtggtgcaatctcatctcactgcaacctccgccttccgggttcaagcaattctcttgcctcggcctcccaagtagctgagactacaggtgcacgccaccacacccagctaatttttgtgttttttagtaaagatggggttttgctatgttggccagactgatcttgaactcctgacctcagacgatcgcccatctcagcctctgcaagtgctgggattacaggcgagagccaccacacctgtcctgcagcagttttttaagtacagaaatggaccatataaactggcatattgctgttgccgtgagtccccttggctgtcctggcacctcgcctaggtgcccctggacctccacataattcatcaattaaaggcttaatgctgggcccagcagagggcccagtgctagtgctgttctgagcggttggtgctcagatactttgcatcctaagtattagtactggccgggcactgtggctcacgtttgtaatcccagcactttgggaggccgaggtgggtggattgcctgaggtcaggcgtttgagaccagcctggccaacatggagaaaccctgtctctactaaaaatacaaaaattagccgggtgtgggtgcgcatgcctgtaatcccagctacttgggaggctgaggcaagaaaattgcttgaacctgcaaggctgaggttgcagtgacccgagatgcgccactatgttctagcctgggcaacaagagcgaaactcggtcttaaaaaaaaaaaagaaagaaaaaggaaaagaaaaaacaaaaaaaccactaaatattagtacttcccacctgtgcatgagacaactgcaaatggcagaaattggggcaagtctaaaatcctggactggtttcttgcccagctgcccctgagagagagagagagagagagagagagggagagagtgtgtgtgtgtgtgtgtgtgtgtgtgtgtgtgtgtgtgtgtgtgtgttttggggaggtggtgccatggtggctcggcctctagttatatctccattctccccagggacgatctgactcagctgccctttacaactatgtgcattaaggagagcctgcgccagtacccacctgtcactcttgtctctcgccaatgcacggaggacatcaagctcccagatgggcgcatcatccccaaaggtgcctaccatgttccgcctgctgctggtgcactgcctccaatgatgtagctgctctattgtccacaggggcctggctatgcctgccccaggtgcactatccctgcagatgggatagctctctgtgtgcctgttgcttctggggtgttggagaaaacccagttgtgtgtgcagggagatagagccgggtgagtccaggtggaaaggaaggaggcagtgtcgcagggatgggcctgtgagggtgcagttggggagggtcagtttcattcagttgccagttactccctggagaccaagccctgccttggttgatacaggggaccctggctcaggttttgagtattgccctttctgggggagatacagcagggtgcagacattcccaggcgtatggaatcaggaatgggctaaagggagagacaggggctggagtagctccaatatggagaggaatgcagggagggctgcctggaggagggaatgtgggaggtgaggcttggagtgtggaagtgaaagagtgagcatgtttatggagtagagcctcaggatgcagattttgaaaggccttgagtgccaggtgatggcgcttgaactcaatcctgggggcagcagggagccaaggtaggtgtttgagctgaagaggagcaatgtcagatctgcgagtaagaaagatccctatgtggccagcttggcagccagaaagaagatgataggttcctcttagggaaaggtgggaagagtggatggggcagcagaattttttagagaaggatggacagaaggtggtggcagatggctcatgggaacatcatggctctagggagacccaagttgggggatgtttctggaggaggccctggctccccttggccccactgatcccatctttccccacaggaatcatctgcttggtcagcatctatggaacccaccacaaccccacagtgtggcctgactccaaggtgagtgcctgccccactcctccctgccctcaggtcctcccctcccctgcgccccagggagccagcgagcagggctggttgcagggcctgagtgcgcacacccctccccactccgcatttagccatttattcacccactgattgttaattcattagggcagaaaatatttattgagcacctactgtgtgccagagtgtgtgctgggctctgaaaatagaggatgatactgtctttgcctttacagggctcacagtgaagttttggggaagacaataagcaaataaataagattttgggtattgatacatgcacaaaagaaagaaaaactgggccagttccggtttacaggtgcagtggctcacacttgtaatcccagcactttgagaggctaaggtgggagaatcgcttgggcccaggagtttgagaccagcctgggcaacacagcgagaccccccatctctaccaaaaaggaaaaagttggcccaatgtggtggcttgtgtctgtaatcccagtgctttgggagaccaagatgggaagattgtttgaggccagaagttccagctcagcccagcctgggcaacacagtgagaccccatttctaaaaaaaaaaaaagttagccagccatggtgatgcacatctgcagtgccagccactcgggaggctgaggcaggaggatcgcttgggcccagcagtttgaggctgcaatgagctatggttatttatttatttatttatttgagactgggtcttgctctgttgcccaagctggagcgtgtgcagtggtgcgatcttggctcactgcaacttctacctcctgggttcaagagattctcctgcctcagctttctgagtagttgggattacaggtgtgtgccaccatgcctggctaatttttttgtatttttagtagagatggggtttcaccatgttggccaggctggtcttgaactcctgagctcagatgatccatctgccttggcctcccaaagtgctgggattacaagcgtgagccaccgcgcccagcctgcaatgagctatgatcgcgcttctgcactccagcctgagtgagactctgactctaacaaacaaacaaacaaacaaagacagacaaacaaacaaaaaaaaagaaaaacaggtggagggggcactttagctcgagtggttatgaaaggccttgccgaggagatgtttgagctgagaacttaggggatgaaggatcagggagaagcctgttctaggcagaggaaacagcaagtgcaaaggccctgaggtggaatctcactggtgcgtgtgaacaacagaaggaggcaggtgtggctgcattgcaggaagtgcaaggtggaatggaagaggtggccctggggtgctccccatccatctttactgacccccagaggctcagggaagggggccaggctgggatgtctggggcagcccccagactcatctccaggctgttcctccctaggtgtacaacccctaccgctttgacccggacaacccacagcagcgctctccactggcctatgtgcccttctctgcaggacccaggtaacccctctatttcccctagtccaagccagctgtgtaggaacagaggcagggaaagatcaggaatgtgcctctcaggagcagagatcagatggcacccaggcgtcctttctgaagacccagcaccctctccccaatgcgccaggaggcccccaaatcagactctgcaatagcatcctgggtattgagcaccaacggtgtgtcaggccctgagttctgggctcccacgctcccattggctctatgatgcctttgtccccgtttttacagatgaaggaactgagactcagagggggcgctgtgtatccaggacacacagctagtaagaggctgtactgggattcagacactcaaccccaaggtcacattaattgagcgatccgtggggtctcactttaaccctcacccagcgtggggtttcactttaaccctcagccagcccaggatgcttgcttcattttcaaaggaggcatgtgacccccggggaccagtgctcacacagaagctgggcctgagccctgtcccctcttcctccaggaattgcatcggacagagcttcgccatggccgagttgcgcgtggttgtggcactaacactgctacgtttccgcctgagcgtggaccgaacgcgcaaggtgcggcggaagccggagctcatactgcgcacggagaacgggctctggctcaaggtggagccgctgcctccgcgggcctgagcgtgggcgcgcccctgcggctcccgagggtccaggccccgcccccaaaggaccaggactcgccccaaagatcccgagggcataggccacccccctcgaagttcaggttcagctcctggatgaccaggcaccgctgttgagcagcctggtggtactggccacgcccctcaaggcaaggctcctccccttagggggcctgatcccgccccttgaggcttaggtcccgccccctgacttctcgcacctgtcctgtttgagggaccagggtcgaccctgcccccttgggctcaggccccgcccccaggatcctacggattgaggtcctcaggccacgcccctgcagatccaggtctccaggccttgcccactgagccttcagaggacctaagacccacctatgactcagggcccaccacaccccacccccccccaactggctgaacccctggcaggcttccaaactgaggaaagctggagcctgacgtcagagcttttaactcggacatcaccctcctgaggccctcagctcatacgggcagactgctcaggcgtgaggctggatcgtagggttcgaggctgcttgcttttgttgttgttttgtaaactcagacccttgtaagccccttccttcctcccttgcccaaagatcctttgctgagtgttctgtttttgcagaataaaagcaaaggatgcagacttaccccaccctccacccctagctcagccagatccttacacgtggagcccccagcatgggaatgaggggctctgcaactgagcgaagctgcgggctaggaggctggaaagccatttatcctaggacataaactcagattttgggggtcagtttgtgtgttcatttatttcatcaacagatcacatattgtttgctggcactgcttcagaaccacaggcaggccctgttttctgccttcttagggggtgggggacagatgttgaacaaataattccacgtgtaaaggtttatttacaacccaggacaggtgctccaaaggagaggccccgggtgctggatgaatatagcagagggatggggatgggtcagggagagcttctccgatgctggaatggaagttgagtgggtgacaaggggagggaagagtattccaggcagaaggaacaacatctgagaataccctgagctgagggagaacagagtgtgtttgaggaactcaccaggggccaggtggttggatctgggaagtgggggcagaatgaaggaaggggccaaatgcacaggctttatgctgagggcaatagggagccatggagagtgtgtgagcgggatcaggacaggacatggccagatctagggctggcagggaggtgacttgcggggttgggaccctgggaaagagggaagctgaggtccagacaacaggaagggccaggattggggtgactatctagcagtgggggctgaggggagggaggtggtaagggtgatgctcaggtatttggctgagggaacttgatggtagagtagtccctgatatgggaatataaaagatgggggccaggcgtgatggcttacacctgtaatcccagcactttgggaggctgaggctggaggattgcttgagaccaggagttagagaccagccagggcaacacagtgagactccatttctacaaaaaataaaaaattagccaggtgtgatggtgcacatctgtagtcccagctacttgggaggctgaggcaggaggatcacttgagctgaggagtttgaggctgcagtgagctatgatcacaccactgcactccagctggggcaacagagcaagaccctgttccaaaaacaaacaaacaaaaaaaggtgggcaatgacaatgtcagcaattttatacatataaaatgctacactaaaggaaaatgatactgctattataccacatatataatatatatatatgcactatatatgccatcattatatatatagtggtggtataatagtggtatcatcttccttttaggtagcatttgcctgtagactatttccatctaggtcactagagacaataatattaattcaacaggccgggtgcggtggctcatgcctgtaatcccagcactttgggaggctgagacaggtggatcacctgaggttaggagtttgagaccagcctggccaacatggtgaaaccctgtctctactaaaaaatacaaaaattagccacgtttgatggcgggtgcctgtaatcccagctactcagtaggctgaggcaggagaatcgcttgaacctgggaggtggaggttgcagtgagccgagattgtgccactgcactccagcctgggcgacagagtgagattctgtctaaaaaaaaaattaatttaccaaatatttcttgggcaatctgccgtgagacaggcactgtttgagccctaggttcccagagtttacctctagggaggagatatgataaatgataaataagtaaagaaagaagtaaattcacacagggccttttctgtgactttttttgtgacagaaatggggagttctgagcagaggagggacaagctttgtcatacgaacttttttttttttttttttgagacagggtcatgctttgttgctcaggctggtgtgcaggggtgcaaccatagctcactgcagccttggcctccttgggctcaaacgatcctcctgcctcagcctcctgagtagctgggaccacaggcacacaccaccatgcccagctaagctttgtatttgttatcgagacgggggtcttaccatgttgcccaggctggtcttgaactcctggtctcaagcgatcctcccacctcagcctcccaaagtgctggaattacaggtgtgagccaccatgccaggacttccacaggactttgtgtgctctgttaaacagagacagtgtgagcaaagatgggactaggcagatcagttaggggtgactgcattcgtccaggtgagacatgatggtggcttcaaccaagccggggtctttagatgtgatcaagagcaattggattccaaggaggagtgactgttcacaaaggcagtgctgtcaggcttggtggtggataaaacgtgaagtttgaaagaagtgggggacactaggtttgggcttgaacatctggaaaaatggaactgccatcagctgacgtggggaatgctgagtggagtaagttgttttgtgggagatgtcaggatgtcagttttggttcagaggaattggacatgtcagtcgaataaacggttctccaattcaagagttttgggttgggcatgtatatttgggaagccttagtataaatattttatatatttttccaaaagctagtgaagcgatttcaaatgggggtgatttttcctaccagatgacattcgttgttatttggaaacatttttggttgtcacaaccggtggttactatttgcgtctagagggtagggacccagcactctgctaaacattctacaagacaaaggatacctagctcaataaaacaagtaattatccagtcccaaaggcaacagttctgctaattaaaaaccatgaactggagaaccaaaacaaacaaaaaaaaaaaaacaaaaaaaaaaaaacagaaaagaaagcaaaactttaagactgggtgagatctcatgtgtgcgtgtgtgtgtgcgcgcacgcgcgcgcgcgcgtgtgtgtgtgtgtgtgtgtgtgtgtgtgtgtatggagtaagggcttaagggagccctgggggtggtctccaaagttaacctaacaattatgaggccaggcgtggtagctcacacctgtaatcccagcactttgggacgccggggtgggcggatcagttgaggcgaggagttccagaccagcctggccaacatggtgaaactccatctctacttaaaatacaaaaaattagggcagggcgcggtggctgactcctgtaatcccagcactttgggaggccgaggcgggcggatcacgaggtcaggagattgagatcatcctggctaacacggtgaaacactgtctctactaaaaataaaaaaaaaatcagacgggagtggtggcacgcgcctgtagtcccagctactcggtagggcgagacaggagaatcgcttgaacccgggagacggaggttgcagtgagccaagatagtgccgctgcactccagcctgggtgacagagcgagactcggtctgaaaaacaaaaacaaaacttttttttttgattgagtgcttcctgtgtgctctttccatatattcccatttaatcctcatactgacttgtaagatcactttttattattccgtttaacagaggtagaaactgagcccccgaatgaagtgacttacccaagatcattcggtgcggcctcagcgctggcgctgagtcctcttctgccccacccctcaggctcccagtcctggtctagatccctagccacgtagcgtagaagggggcgtcgacgggggttgggctagagttggagcggggaggagatgagctaaagcggggctggctgtgcgagaggcagtagcagcggcgtgtgtcctggggcgccccccggtggcctgtgctggggtcgtcggccgggatcccctgttcgacgtactccggggctgaatgggaaacagacagtcccagaccctacgtgagccacccggatcttgcaggtgctgcctctcctacacccccctcccaaccgagggtctccaagagcgcatcctttgccaaacatctcctgggcccttttcggcgcaacctcgccatccactagcaaacgaagttagccttgagatccgacatatgtgggctcaatctaggctcttccttcctaggggcggccttgggcacgtgactgtccctctctgcacctcggctttttcttgtcatgcgaatagtccggtatcatcatgcttgtaatgcacactgagtttccgccaagggccacgagggtgaataaatgagaatgagaaggggaggagtaaggtccctgggtccccggagccctgttacacgtactgcaagtgtaattctcaaaacaccgaagtctggtcctgtcgctggcggctgtgggacctccttcctcctgagtgtgaagaacgctccctctgctggacaatttggagatccattctctattcgttcaattttgtgtccgtgcacgtttgagcgtgcatgtgtgaccgcgtatgtgtttgggtgcatttgggtaacagtgtgtgcatgtgttgtagtgtgcacacgagtgtgtgtaaacgtgtatgtgtcggtgtgactgtgtgtgcgcatatggatgggtgtgttggaaggagaggagaggagaactccactcactgagtcactgtaactatccacacacaccaggctgtgttcctgctcatggctggagccactgtcagagcccttgcctctgtccccaggtctgacctgtgcggtgcaggcaggacattctggagaaatcatgcccttggaggaagctgtcagtaatgactggtgggtattggtggataaataccccagctccctctctctgggggtgaagactcccttgttctgggaggtgcatgttctattctgtctccctgaggtactaggcagggctgagccctagctacccacagtggaaacttcctcaataaaggtccctttaactgctgctgccttcccttccccatccctcttctccattgccctaattgtgtttccagggatcacctcccaaagaaacaacaggcagttgaactcttgtcttatggtcaccctcctgatagaggatttgcactcaactccttgtattaaggtctagttccagggaacccaaattaagacacacatgtgtgctggttcctccaatccccagaagcctgtcagtgtgcgcttttatttattttttttaccaacgatgaatgtgaggctcagagagggcaaatcacttgcccaaggtcacacggcagtgagggagtggcagagcctggctttgactatgggctgtctgaccacaagctgggtgctcactcctctcctgacagcctcctccctcctcaaggacatggaaggagcagggaataagttataagtgtaaaatttgaaagggaaattcttccgctttctgcttctgcttctacctctggcccagcagtttggtgtgctcttttttcagtttttaaaaattaaaaaacgttcatatatatatgaacgttttccaatgtatataaaagcatttatgcacacgttaccgggttttttttgtttattaaaaaaattttttttttggagacagggtctcactctgtcacccaggctggagtgcagtggcatgatctcggctcactgcaacctctgcctcctgggttcaagtgattctactgcctcagcttcctgagtagctgggattacaggcacaccaccatgcctggctaattttttttttgttatttttagtagatatgaggtttcaccatgctggccaggctggtcttgaactcctgacctcaaatgatccacccaccttggcctcccagtgctgggattacaggggtgagccactgcacccggcctttttttttttttctttttttgatacagggtattgctctgttgcctaggctggagtgcagtggctcaatctcaactcattgcaacctctgtctcctggggtcaagcaatcctcccaccaccacatccagatgcttttttttgtattttctgtagagatggggttttaccatgttgcccaggctgaactggaactcctggattcaagtgatccgcctatgttggccccccgaactgttgtgattacaggcctgagtcactgcacccagtccattatcagttttttgatgactccaaacttgttgggaaatatatctgtttcaattatctattattgtatattgaactaccaggaaacttagtaggttaaaacaatatacaggccaagctcggtggctcatgcctgtaatcccagcactttgggaggccgaggctggcggatcacctgaggtcgggagttcgagaccagcctgaccaacacggagaaaccctgtctctactaaaaatacaaagttagccgggcgcggtggtgtgagcctgtaatcccagctacttgggaggctgaggcaggagaatcgcttgaactagggaggcagaggttgctgtgagccaagatcatgccattgcactccagtctgggaaacaagagcgaaactccatctcaaaaaaataaaaaagatatacaagttttttttttttttttggtatgtgtgtatgaactcctatctgtatcagaatatatacaacttttagtttgctcacaagtttacaatttgggcagggctcagccaggatggctttctcagtcctacacagcatcagtgtgggcagctcatttgaggctggaagagatactttgaggtggctcactctcatggctggcaatttggtgcttcctatttgctggtaccgacttcctgcctcggcctctcaaagtgctgggattacgggcatgagccacaatgccctgaccattttattttttcttttattttctttcttctttctttttttttttttttttgagacagggtattgctctgttatccaggctggagtgcagtgatgcgatctcacctcactgcaatctttgcctcctgggttcaagtgattcttgtgcttcagcctcctggatagccaggattgcaggtgcatgccaccacacctggctaatgtttgttgtgtttttagtagagacagggtttcgccatgttggccagggtggtctcaaactcctgacctcaagtgatccacctgccttggactctcaatgtgctgggattgcaggcgtgagccactgcacctggccaaaatatataatacattaaaaaaataaagtttattaaaaagaaaaagaagagaggaaatcactgagtaacatcgagtaacatgctctggtggtggttcctagctcttgtgtgacctctgaacttttccaaagttcccttctaggatttctgtctcccaatccagttcatctggtcttctgtcacccgggctgcaaatgtggcagttatagctatacctgctggtcctgccctcaatatggactaaggggcttgttgggtttgcaattcttcttcttcatcatctttttaatttttatttatttatttatttttttgagatagggtttcactctgtcaccaggctggaatgcagaggtgcaatcctagctcattgcaacctcaacctcctgagttcaagcgatcctcccaccccagcctcccaagtagctgtgaccacaggcatgtgccacaacacctggctaattctttgtatttatatatgtatatatatatatatatatatttttttttttttttaaatttactttttcagagatagggtctcgctgtgttgctggtctcgaactcctggggtgaaacgatccacctgtcttggcctctcgaagtgttgggactgcaagcatgagccactgtgcctggctgggttttgagttcttgagagtgttaaatgaaacttcaacactggcttctggtgtgagcgttgggtgagatttcatcggtcaccacatgggtctccagtgcaccctgcttctcctgcatctcttggttgcaggcacccctctagctctgattatctcagtgcatttgaggatggaagtgagaatgaacatgtgtgtcccacctggtgctgggtctttatacagtggcccttatgcagagccccctcctttatgtcattcaggttcctgctcaaaggtctcctcttgggacattcctgcctgatcactgagtccagaacagccccctcagtcgctgtctagcttgtctcattctgttaatttcccataagagaagtggcatgtcaccatcaccatgcactattggttaagcaacttgagtagcttgggacctcagcctcccaagtagctgggaccacaggcatgtgccaccacacctggctaatttttttgtatttttgtattttttttgcagagatgaggtctcactgtcacccaggcactataggttaagcaaccaatagtgtgtggtggaggtggtgacatgccacttctgttctcaatcccaggccagtccagattcaaggggaaagaaattaagctctccctcttgctgaagacagtgacaaagactttgtggctatcacctttaaggggtctgggttagaatctgagattctgcatttccaagatgctgctgatccaaggatcacatcttgagtgtccacttcttatagctcatggctagaaaagtccctttcttccctaaatatttaatgagcacctactacgtgccaggattcattttcacccatgctaatgtttaattacttcattgtgtggctggagcaagtttcggcacctctctgtttttgattttccccctccctcttctccccagacctagctgggcacctaccctgttgcctcccacctactccagggggccctggccttgcccctggctcgtctgtggggtggaccaggtggagccaccccagtagagaagaaggagaatctgtacatctcagcttgctggcagctccagggccctccaacgtgctctaggacctgaagctggatcaggcagggctacatggtatgtagttagctcttagtgggggaaggaaattttggacatctccccaacattcgatcaattacaggaggaacacctatcctgattttctcattcagcagctccatccttcaaacttactctcatcttggggctgggcttgagggctcacgcctgtaatcccagcactgtgggaggccgaggcgggcagatcatgaggtcaggagttcaagaccagcctggtaaacatggtgaaaccctgtctctactaaaaatacaaaaattagccaggcgttatggcgggtgccagtaatcccagctacttgggaggctgaggcagaagaatagcttgaacctggaggtggagcttgccatgagctgagatcgcgccactgcactctagctttggcaacagagcaagtctccacctcaaaaacaaacaaacaaaaaacgaaaaaaaacccaaacaccaagaaaacagaaaaccccactcaccctcatcttagcgcctgagggctaagaacacccaataggggatttcaggacagtatctgaacaagatgtgcccctttaaggccaacatcccatttcccagataggaagacccagtcccggagacccagcactgcccacagtcagagcaaggacggggcagaatgaggactccactcagagtcactccgctctgcccacccacgcctgccccctgtccgcccacagcccctctcactcttgccccctatgcctcccaccccaccttctacactgaataaatcttcccattatagtgatcccagagtcagctacttaagagtcttggccaggcgtggtgactcacgcctgtaatcccagcactatgggaggccgaggcgagtggattgcctgaggtcaggagttcaagaccagctgaccaaaatggcgaaaccccgtctctactaaaaatacaaaaattagttgggtgtggtggtgggcacctgtaatcctagctacctgggaggctgaggcagaagaatagcttgaacctggaggcggagcttgcagtgagctgagttcacgccacctcactccagcctgggcaacagagcgacactctgtctcaaaaacaaaacaaaataaaacaaacatcaaaaaaatgaaaaaaccccactcaccctcatcttagtggctgagggctgagaacacccaacaggggatttcaggacagtatctggacaagatgtgcccctttaaggccaacatcccatttcccagataggaagactgagcccaggagacccagcactgctcacagtcagagcaaggacggggcacaacgaggactccacccagagtcccttggctctgccctcctatgcctgaccctgtccgctcatggcccctctcactcttgccccctgtgcctcccaccccaccttctagactgagtaagtcttcccattatagagatcctagagtcagctacttaaaggtcttggctgggcacggtggctcacgcctgtaatcctaaaactttgggaggctgaggcgggtggatcgcctgaggtcaggagttcaagaccatcctggctaacagggtgaaatccgtctctactaaaaatacaaaaaaattagccaggcgtggtggtgggcacctgtagttccagctacttgggaggctgaggcaggagaatggcatgaacctgggaggcggagcttgcagtgagccgagatcacgccactgcactccagcctgggtgacagagcgagaatccgcctccaaaaagaaaagaaaagaaaagaaaagaaaaaaaaagagtcttgatgagtttcacttgctgctgaaggcttctttcctttctatctagtttcctaatcctcactgctgtgcatgcagataaatctgttttgcattaattaaaacaaacaaaaccgaccacagctgcctggtttactcttccagttctcctcttaatccccagaatctgacctgggtaatcctcagcggggctggattctttgttctttgttcctgctcctggccatcatgtgtcacctcagccctgggctggctggaggcaggacttgaatttctgccaggttgtgcagtcagaggccagagactcccttctccaagtctcctaattctgcaccgagaaatggtgcatggtgtcctcccagcccacttgtgggagatgtttgggtgcaaggcttggcctgcctggttctccttgcctgacgcctgaattcccaacctcatgatttacgtggccttggaagggcaggggcagctgtaaacttggggtcccagagtcaccttggccccaggttcaagcaggagatactgaaggctgaagatccagtttccactctgaactgtgacactgacttggttcctctctgcacccagctgatactgcctgcaggttttggccagctgcccaggcagggaggaggcagccaggcctatggcctacggggattggctgcccctgactgcccagcccagcccagccttgcctaggtgaggggccagggacaaagaagccccaggaggagggaagaggaagttgtgtgggacaagctgctcctgacagaaggtgccaggctggaactgtcggggctggagggtcctggtctgggagagggaggggcactgcccaaggctggggtggctccagggagctggtcctggtggggctgatgggttcctggtaactgaaaccaagccactgacaacctgcagtgattcaggctgggcctttcaggactctaatcagccttcctctctctctttctctcttccctctctcttctttactctcttctctctccgcctcttctcctggctgtacctgggtttccctctctgctttcagcccttgttttctcatctctgagctctccctgcctccagcacctcccatccctgcccctgtccaatgtccccgaagctccccgggctctttttctgggcctcaggacctcaccctccatcccgtgtgccctgcaggatgtcgctgctgagcctgtcctggctgggcctcgggccggtggcagcatccccatggctgctcctgctgctggtcggggcctcctggctcctggcccgtgtcctggcctggacgtacgccttctatgacaactgccaccgcctccagtgtttccagcagcctccaaaacggaactgcttttgaggtcacctgagcctggtgagtatggcagcacgacgggtctggggtctcagggtgggtggacttctagaggggtgggaatggggctcagggagctggatattgagggtgggttggggtctgggacatcagaggagtgagggaggccgaggggagcccctatttcctcactgccccaaccggattcattcctcctctctgtccactccatggccccaggcctttttctttctctctcttccccaccctaagcctgctttggctcaagttcctacttgtcttccccacattaatgcatcgttgtatccttgttctactgggggcttctagggtggactgcacagagcaggtactccctggctgcccatgttttttttttttttttgagacagggtctcgctctatcacccaggctggagtgcagtggtgcaatcatagctcaccgcagccttgacctcctgggctcaaccaatcctcccatctcagcctccccagtagctgggactacaggcgtgcaccaccagacctgctagtttttttttttgtagagacagggtctcactatgttgcccagagtggtctcaaactcctggcctcaagcaatcctcccatctctgcctcccaaagtgttgggattacaggcatgaaccactgcacttagcttagtccacaatccttatcactggacttgaggtctcctcacggggagagtccagagtccactctctgcctggcccatctctgtgggcctcaggctggtgtctactcctctctgggctgctgcctccccataagatttgctatttctccctaccgcacccacagggcacagctgggccagaggaaagatgtggctggtttctccctccgtgtctttaatcaggcacctttttttcttatatttccctccacccctaagatatgtcaatgggccccattgctcagtttggataacagttgactacttttcctttcagaagggatcattctggcctctgccctaacagccaaattccctgggaggagattcctcatctccctcatcctagcctcccccctagaggacttttctccatgctgtgttggccctctactgccagaatcataccttgggttggtcattatctgtaaaggcgccactccaatgccattgattcaagtgttgccttctctgaccacaatcccttctctccttctagctttttctgttcactatctctcaaccttttttttttttttttttttttttgagatgtcgtctcgttctcactcgtgcacaccaaggctggagtgcagtggcgtgatctcagctcactgcaatctccgcctcccaggttcacgtgattctcttgcctcagcctcccaagtagctgggattataggcgcccaccatcacgcctggctaatttttatatttttagtagagatgaggtttcatcatgttgtccagggtggtctcaaactcttgacctcaagtggtctgcccaccttgacctcccaaagtgctggcatgagccactgcacctggcccactgcttctcatcttacaccctgttgggacttccagttctctctacaccccagtctagcagcttcttccagtccttcctaggcatagttcctattatttgctcatgggctggtttctggccaatgggactttctttcctggccatttggaagacctttgccttagatgagctcaatcgcccatgttctgtctttatttttcattttttatagagacagggtctcactatgttgcccaggctggtcttgaactcctgggctcaagcaatccacctgcctcagcctcctaaagtgctgggattacaggcatgagccatggtgtctggccacccgtgttctctttatttcttctctacaacaatattagagaaggtcacaaagcaggtcagatgggtgatatgtaaattccctcccacccacctcctgtgcaccacattctgcgcccagaccttcagcctgcttgctctgctgtcccctcaaagacagagttgccttcactcactccctttgtttctctgatcgcccctcacctgctctccaccccatcctgctgtcttgaggtgaccgtgaccctcaagcccccaaatcccatggacacctcccagccccaactcatctacctcccagcagctctctgaatttgtgactactcagtcattcccagtacctccttttttcttggttccaggacgttgccattccctggtctcctctgaccttcgtgtgctcccgtgtctctgctgttggctcctcactatggggagatcccccatggtcctagtcattcctccctcttgcctctctcctgaggtcacctccttacccagggctccagcttctaaattgaccatcggttccctctagaagtgagctctgagtttacatctcctgagctggaggtcattgcttctctcctctcggggtgggggtggtctcagaaacacttccattccgatcggtttgaatctgaactcatggcccccctccctacactgtcccccattttggtctagtccttcagtttcccagaccccacgctttggggtctcctgatgttctctttctctcatctgcacatcctgtccctcagcacgtctgctggtgctgcctggcacagtctctcctccgtcaattccttctctgagtcctcctgcctcccctggctccatcccttgccacctctctcctggatgcctcccacgggcgcctccctggtctccctgttgccgtgcccaatcctttcctccactctctcctcagtcccggacaggctttttccttccttccttccttccttccttccttccttcctctttctttcttcctttctttctttcctttcttcttttctttctttctctttctttctttttctttcttctttcttttctttctctctatctctttctttctcccttccttccttctttctctttctttctttctttttctgtctaaaaaaggaaaccatttataaaaattacagacaaaagcacacaaattacactacaaatccattagagatactatcaattggctaacaggcaaaagttttgcctacacagtttgaataaatagagacagagattatcgacaaatttaagaaaatcgatgcaatctcataatcaataaagacaatttcagatgtgaccttttattttatttttttatttttttgagacagggtttcattgtgccgtccaggctggagtgcagtggcatgatctcggctcactgcaacctccatctcctgggttcaaatgatcctcctgcctcagcctccctagtagctgggactacaggcatgtaccaccatgcccggctaatttttgtatgtatatatatggtttttttcggagacagagtcttgctctgtcaccaagactggagtgcagtggcatgatctcggctcactgcaacctctgcctcctgggtttaagtgattctcctgcctcagcctctggagtagctgggattacaggcgtgcaccaccatacccagctaatttttttttttttttttttttgtatttttagtagagacagggtttcaccatgttagccaggctggtctcaaactcctgacctcaggtgatccgcctgcctcagcctcccaaagtgctgggattagaggtgtgagccaccacacccggccaagatgttacttcttgactattacattgataaaggctttttaaaaacatataaggccttcagtgtgtaatgctgtccaccttcatacggagcagatatgcatgtggatatttataaaattcttcttcaaagtaattttgcagtatatatcaaaaacttcaaactataccaatgacttattttgaggacactatattcagttgataatcaggtatatgtaacataattacatgagacttccattgcatttgttatgctagtaataaatagtaaacatgttttcaaaactagtgaattaattatggtaaagccatatggaccactgcaagttccctgagagcaaaagtgacttcacctgtcctatcccctgctctatcacctgaatgtagaatgcacacagtctatcttgaataactatttgttgaaggaactgtatgaaaacattaatcattatgcttgtgaagactgattgaagaataattaaaacatcaagctacatgaaaacatgacacagatcttatagaatgagagctcaggttttaaagtttgttatttgcaatgaagtaaagagatgagatggctggtgcagtggctcatgcctgtaatcccagcactttgggaggccgaggcaggtggatcacctgaggtcaggagttcgaaaccagcctgaccaacgtggtgaaaccccatctctactaaaaatacaaagattagtcgggtgtgctgatgggcgcctataatctcagctactctggaggctgaggcagcagtatctcttgaacctgggaggcagaagttgcagtgagctgagatctatccattgcactgtagcctgagtgacaagaggaaaactctgtctcagaaaaaaaaaaaaaaaaaagatgagacctggacagacttttttgatagactgagccacttattgggaggcggaggttgcagtgagccaagatggccccattgcactccagcctaggcaacaagagtgaaattccatctcaaaaaaaaaaaaaaagtggctgggtctcattttcctctttattggtttgtgccacccaacatcatacgatctgtcatcagcaccacaggtgctcactcagaacacctggaagtgggtgctatggcagtgtccaaagcctgtgagccccttcttgcccagcttatgtgttgatcctgtaggacccaaggtccccgtggctctggacgcccttggtcatcttttatttctttcatttatttgccaatctccatcctagggatccttggagagactcagttgaggttctaccttggaggcacccccaatcttggggccacagaactagactgagacactccacatcctgtgtggtcagggctggcttgaaggagagatggactgtaggacccctgaggggaatcagggtttttgccaatggggcaggcaggcaggcttcctggaggaggggtttgtggaagtgggtctggaatgatgagtaggaatttttttaagcaaagaagagaaagagaaagataatttcatgtggaggttgggccaactcgaagacttggaggtgagagcaagcacctggcttttgagcagcaagaaagagcttggtgccaccagaacaattaggatgagaggcagaagaaagagggaggggaggagattgattctgaggacaatggggagccctggagggtgtgtgaacaggagaggggcaatatcagctgactggctccttccgttgccccacctggtttctctccctttttatcaagctcctttctatagcaacccttgcagaagtatctgcaattcaggttttgcttctagagagcccacactaagacagggccttatgattctccagtcattcctctcccactgacctgctacctctgctcttgttctctgactggcttctacccattttcttccacttccttctggatctcttctgggcatctccttcagtctttcccagctggctccagcctgggcacagttgtgggagtgatgggagtatgagacagaacattctcccatgaactcaaattcagggctatccttggggtgggatgtggagcctggtctgggggtggtgcagccaggcttgggagaaggggctgtgtctacatcttccccctgctaacttgctgcaaagctgggggtacctgtctagagctaggggcaggaggctgtgctgggactaggggacaggagagaaagttcaatggactgagattcattatgaatttgggataaacagcaagtggggtgaatggtcaagtgttggtggggagagacagggagagggatggagagttggacttgggagagacagtgatagggaaaaagatgctcacacagagaaagagagagacagtgagagacagagtgagggagagagaggggagagggagagaaagacacagagaaagtgacacataaacagaaagtaaaagaaacacatagacacacatatctaaatctgtcattgatcatatctgtcatctatgtagccatcactcatacatctctctcatctatacctgtctctcttatctctctatccatctatcctatttatcatctatcgatctgtcacctacctttctctttctctcatctatctgtctatcgtattatctacctacctacctacctatccatccatccatcctgcctgtgcatccattcatccttctatctatcctatctatctatctatctatctatctagctatctatctatctatctatctaatctatcatctatccatccatccatcttatctgtgcatccatacatcaatccatccatctatcctgttatctacctacctacctacttatatacctacctcctacctacctacctacatatccgtccatccctcctatctgtgcatccatccatgtatcctatctatctatctatctatctatctatctatctatctactttttttttttcaagatggggtctcgctgtgtcacccaggctggagtgcagtggcgtgatcttggctcactgcaacctccacgtcctgagttcaagtgattctcctgcctcagcctcccgagaagctgggactacaggcatgcgccaccagacccggctaatttttgtatttttagtagagacaggggggtttcaccatattggtcaggctggtcttgaactcatgacctcgtgatccacccacctcagcctcccaaagtgctgggaatacaggcatgaaccaccgcacctggcctatctatctatcttctatctatctgcttgtatatctaccgactgaccaacctacctacccatttatccatccatccatccagcgatccatccatccatcctatctgtgtgtccatctgtccatttaatctatctatctatctatctatctatctatctatctatctatctatctaatctatctatctatcatctccctccctccctccccacctacctaccaatccatccatgcatccacccatcctatctacgggtccatccaaccatctatcttattatctatctgtctgtctatctatctatctatctatctatctatccatccatccatccatcatctacatatctatctagagaaagacacagagagaggaagagagtgagggaacagagaagcacatagacacagacacagaaagagacaggcagagaccaatatttcaggtgaaagggctgagaagtttgggggtgtgtggtgggtaggggggtgcaatgggcagtggtagcatctgaggccccctgccagcctggtgtcagccttgtctatccccagatgcggggcaatgaggaggacatgaggctgatggaggatctgggccactacttccgtgatgtccaactctggtggcttgggtctttctaccctgtcctgcatctcgtccaccctacgttcactgcccctgtgctccaggcttcaggtatctttctcaggaggctatgctgcagcatcttccctgcctctgctccctgccttcccaacctttggacaggccatgctgagcagaaaaatggacatatccaatagagaccatggctctgccactaacctgctgggtgactctgggcaggtccctggtgctctctggctcctgaggcctcttttagttctgaatgaagaaaactcaaccctgtgtggtctaagcaaagaaacagaatgcattgactgtaaagtaaaagtcaggaagtaaaagtgaagtccaggaagggtggtcttcaggcatggctggatccaggccatcataatgccagtcttcatctcttagctttgtatccctctgtgatggtttcactctcatgctgctaaagataaatcccagaagctcaacccccatggaaaattccctgtagttccaggaaaatttccaggattcccctaaatttgcctggcctgggtcacaggaccaatttcttatccagtcactgcagcttgattgcataggtttaaggtcatatgcttagctctggagcaggggatgagaacccactcaactacttggattgagagtggggaaggcatgaggaggatggatgctggacgggcagataccaccattcaccagacatccattcaccagcatccctgtgagataggcatttcctgagtcagaaaactgaggtgcagagaggtgcaatgacttctcaaggtcacacagcatatcgaggcctccctcttagttctttttgtaatttttttgagacagggtctcactcattaatgcttattgtggagtgtggcaggatactgaggaagcctaaatcaagcctaggttacatgtgggatgctaataggaccagatttaaatcctatctggggcccatctatagggcatgtggaagtcattttagactctctcaggtccatgtctgagcatgccacatcaggacaggtcatgtatattgtgtcaatgtcagaacatgttaacgcatctcaggctatgccacatatctcaggtccatgtcagaagatgtcagagagtactgggcagacagggtgtcctaggtccttttttttttttttttttggagacagcgtctcactctgtcatcctggctggggtgcagtagaacgatcttggctcactgcaacctccgcctccctggttcaagcaattcgcctcccgagtagttgggactacaggcgcccgccgccacacccagctaatgtttttgtattttttagtagagacggggtttcaccatgttgcccaggctggttttgaactgctgagctcaggcaatccgcccacctcagcctcccaaagtgctagaattacaggcgtgatccaccgtgcccggctagggtgtcctaggtccttgtaaaggcattttgtagagcgttgagctatgctcaggtgttgcagaacatgttggaccatgtaggagccatgtcaaggcgtactggggtgtgctgtgccatgttgggctgtgtcattgttctactgcaccgctgcagcctggtctggtccccagtctcctcccctgtcctccctccttcctttgcccttgaccctcttcctgctatgctgggcctggagggtggaagtgcaaatccctggctgggagcctccccctacactcaaagtccctcccctgcccctctccataacccctgatggtccttattcatgtcagctgctgttgcactcaaggatatgagtttctatggcttcctgaagccctggctgggtgagtaactagatgaatggggatggggacaaccttctggggccaggggaaggtgctgtccttgcccatggcccttggctgcctctactaggggatgggctcctgattagtgccggtgacaagtggagatggcaccgccacctgctcacacctgccttccacttcaaaatcctgaagccctatgtgaagattttcaatgagagcacgaacatcatgcacgtgagtgccacaaactcggatcccagctgggcccttggaaaaggagaagtgacctcagacagatctggtctgaaatgctggctctgctgggtggctttggtgccatagctcttcctccctaggccttggtttcttcatctgtaaaatgtggataataatttctacttaaagggtggtcaagatcttgtaccgaagtcatgttcttggcacatagtaggtgttcagaaggcattaattactagtctccctcacagaaaccttgcaaactaataaagacagttatgatgaaatttggataatggcagggcgcagtggctcactcctgtaatcccagcacttttgaggccgaggtggatcacttgaggccaggagattgaggccagcctggccaacgtggtgaaaccccatctctactaacaatacaaaaaaataattagctggtatggtggcgcatgcctgtaatcccagctacttgggaggctgaggcaggagaattgcttgaatccaggaggcaaaggttgcagtgaactgagattgtgccactgcactcctgcctgggcgacagtgagactacaagtccaaaaaaaaaaaaaaattgcatatagctttttctgcatagcaaaccactttaaaactcactggccctggtgggccaaccagacacttccatttgtcccttattttccaggaggctagcctgggttcactaccaccatggagcctgagtttcaagagagtgagcagaaacattttagtacctcctgatgcttagttcagaactagcacactagcatttttaccacattctcctggtgaaagccagtttcaagaccagctcaaatccaggagatggagactcaggctctgcctgcaaatggaaggaggtgccaagtctcatcgccaagggtgaggggcaaaaagttggggacatttctgcaatcacttgcctctgtgctaatgatgaggatgataatgatagctaacatttattgagcacttagtgtataccagaaactatatgccaattccatgatctatgttgtctaatttaatattcacaatcctttgaggtagagatgatcataattgccacattatggatgaagaaattgtgggtcagagagattagggagcttgcctaagtttacacagttagaaagtgagctaaaagtggtggagaaggggttctaacctggttatctggcaccaaagcagatcatcttgttttgcttttttttttgttttttttttttttgagatggagtctcactctgtcaccaggctggagtgcagtggcatgatctcagctcactgcaacctccgcttcctgggttcaagcgattctcctgcctcagcctcctgagtagctggaattacaggcacctgccatcacatccagccattttttgtattttttggtagagacggatttcaccatgttggcccagatggtctcaatctcctgaactcatgatctgcccatctcaccttccaaagtgttgggattacacgtgtgagccactgtgcctgacccaaagcagatcatcttaactattactgaagatttgacaggggggacctaaagagggcagtgggctgaccaagggtacatagggcacagaagcagagctggaacttgaacccaggtcacccgaaccccagccttgggccttcatgtcctaatagtaacagcttctgtccctcacaagcttggtcctccttggggatgggtacccgggaaagacgactaggagttggttctgggggagtccatcctggaggttggggacgggaagggactcaggggagccagggctcagttcctgctctgtccccttctctggccaggccaaatggcaacgcctggccttggagggcagtgtccgtctggaaatgtttgagcacatcagcctcatgaccttggacagtctgcagaaatgcatcttcagctttgacagcaattgtcaggagtgagttcttccccaggacctgggatcttggccatggacccacaggagtaggttatggagagaggactgatcagggcatctgaagtgtcttcttggagaaaatgagtcagaattgagcatggaagtacagggaaggggagagagaaagatcagttctccaggtaggtagaagtgtttgggtaatggcaaggaggctaggatgagcagagcacgtgcaatggccatcaaggggacaccttggaaatgagattggaggggtcagcagtagctacaacttaatgacattgaaaagccatgcaaaggggtatgaacttcatccaaggctcccagggaatcatgggaggtatttgagaagatgagggtcatggtcagtgctgagcttggacgtttgactctgtggaagattgactgttatgtagacagaggaagcaaggagaccatggagaggaagaggcctgagcttggtggagaaaaaggggcagatttgagagaaaccaaggagaaataggcaggagcagatgttgtgtaagatgcccatgatggccaagctgtgccctggggcatctggggcaggaggcagctcacagagagtgggaggcagagagtgaagtgtgcttgcagggcacccttttctgcaccgaacgtggtcctgggattctggctagaaggtgctcccaggctttcatgtgtgtttagaagctgcttcctcttcctggcctgaccctgcgggaagcccagcgaatatattgatgccatcttggagctcagtgccctcagtctgaaacggcaccagcacatcttcctgctcacggacttcttgtacttcctcactcccaatgggcgacgcttctgcagggcctgtgacatagtgcacaacttcacagatgctgtcatccaggagcggcgtcgcaccctcactagccagggtgtcgatgacttcctgcaggccaaggccaagtccaagactttggacttcattgacgtgctcttgctggccaaggtgggctactctgggatctgaatttcagaagtagaatggactttgacgtgaaatgtcagatccatgaacttggacttgatccagagggcactggggagccatggaaggtgcttgaggaaaggagggacaagtaagatatattttagaggtgactctgtagaagagttcctagaaggagcaaacaggaggcaagagactgggaaagagtcctgctaggcaggtctaatgatgataagggaggaatcttgcctggaatatggatcttcatgaactgttttaggttagactcaggtgccttcatggctggtgtaatttagaggtcttgtcttgtctccaggatgaaaatggaaagaagttgtcagatgagaacataagagcggaggctgacaccttcatgtctgggggtgagggtcccagggtgtgatgtcactaggggtaggagtgtctccattccagggatgtggtgagtggaccctggatcaccccatcccatcttccttccccacttccttctgagggcctcaatacatgggtgctgtccacccttgggtgctgaagcagcccagagacccaagcttacctggctgcccctcaggccatgacacctcggccagtggtctctcctgggtcctgtacaacctcgcgaggtacccagaataccaggagcactgccgacaggaggtgcaagagctcctgaagaacggtgatcctaaagagattgaatggtgagtgtgcaggtcctcatgacctgttcctgagtccctctcattggtttagctcttcaggtgggaaagggagaaggtcttattggtgattgtgctattactgcctagtgggaattggtgcagagctcagaaacagggcctggtactcagcctggagcaaaggaaatgttgcaggatttttgcctttactatctattgcaattaaactcattcaattattttttcttttttgttacttctttcttttttcttttctttttttttttttttgagacagtctcactgtgtcatccaggctggagtgcagtggcataatctctgctcactgcaacctctgcctcctgagttcaggtgattctcctgcctcagcttcctgaggacctgtgattgcaggcatccgccactatgcccagctaatttttgtatttttaatagagacggggtttcaccatgttggccaggctggtctcgaactccagacctcaggggattcgcctacctcagcctaccaaagtgctgggattacaggtgtgagccacagcgcctggccaaacctattcagttctaatagatattgccgaattgccttttagagtctctgcactgattaactctccagtgtgttgtagaactagttctctttgtttcctcctttttgatagctgcatagtgttctctcataaggatgtactgtaattcatcaaaacatttctccattgatggatatttgtgtgctttccaggcttttgctataactaacatgatgtagtgggcacccatgtacactgaccattgcttacatctgtgagcagctttgcagtaccaattctgagaagtgcagttggtgaactgaagaccatttgagattgacaattcaatagctcctacacacacattttgagaatgccttcctcacattctcccctaaagtgtctattatgaaactttaaaacatttgccaatctgatagatgcaacataatacttcaatgaacatcactttaagcctgggtaaagttgagcattgttttcacttactgaccatgggtatttcttattctgtgaagtgtttgcacaatttgttccttctagtttgggttttgtagtttttttcttattgatttataagcactgctcacagattaagaaaactagttctttttttctgttttgcaaagttctttttcagattgtctttgaattaattgttggttttcattcatttattttggcttgattaatttatttgcagtcaaattctttcctttatacgtgccgttttttgttttttttattatttttattattttttttttgagacagagtcttgctctgtcacccaggctggacagcagtggcaccatctcagctcactgcaacctccgcctcccgagttcaagtgattctcctcctcagcctctcaagtagctgggattacaagtgtccaccactatgcccagctaatttttgtatttttagtagagatggggtttcaccatgttggccaggcctcaggtgatccacctaccttggcctcccagagtgctgggattacaggcgtgagccactgcgcctggccatgtttttgtttttttaaatcatgcatgggacattctttcatgctctaaaattaaaatgtaaaactcatgtttgttttcctctgatgggtttatttgtttttaaaatattttatttattattttagtttaaaaatatttattacttttttctctatgaagtctatgatagtataagaattgttgtaggaatgtattcattttcctccaaatggctagttgccccaacagaatttaatgaatattttgtatttgtcttacgattttaaataacagcagattcacaataagtgaaatttatttatatatttgggtctgtttcttgggctttattctgttccacttaattttatttatttatttatttatttatttattttattttttttttttgagacagaatcttgctctgtcgcccaggctggagtgcagtggtgtgatcttagctcattgtaacttccatctcctgggttcaagcgattctcctgcctcagcctcccgactaactgggactagaggtgcacatcaccacacccggctaatttttgtatttttagtagagacagggtttcaccatgttggccaggctggtctcaaatttctgatctcaagtgatccgcccaactcggcttcccaaaatgctggggttccaggcgtgagccaccacgcctggcccagttaattatatagtcatacataagcatcaagatgtcttcatcattatactttaaataacactttcatatttgataaaggtgatcctattttattactttgcttttacaagtttttctttttttcttttcttttcttttttttttttttttgagatggaacctcgctctgtcacccaggctgaagtgcagtggtgcaatctctgcctcctgagttcggctcactgcaacctctgcctcctgagttcaaactattctcctgcctcagcctcctgagtagttgggattacaggtgcccaccaccacgcccggctaatttttttgtatttttagtagagacagggtttcaccatgttggccaggctggtctcgatctcctgatctcaggtgatctgcctgcctcggcctcccaaagtgctggaattacaggtgtgagccactgcacctgacctgagcacctcttcttattgtcccacttatgcctagtgttccattattggaatgctaagcatgtgggagttattcatattctactgctccaggtcattgccaaggtctgattttcaaaattcaaaaaattgaaacctcaggcataaatgggttaaatctcttatagacctcagggcatccatgatttcttagatcatattcttttctacttttctcttgggtcacctgttctttctcttgttattttgcaggaattccttgtattctagatattgtagaaacctttgaatctctcatctgaatgttcatttggtccatggtatcctgtgttacacataattccttaattttcatgcatatttatcctttttctttttgatcttctactttgtcctttcgaggttttaagaattcccacccttaagtcacaaaagtgtttcttctgttatcttctcttaactttatagctttattcatctcatataggaagagattccatcctgtatatgaagtagacaaggatctggtttttttgttcccaaatttccaattgtttgaacatcttcctccaaatcatctatcaattgcccaggggtgtgtgggcccctctttaccagaagttgttaaattttcacctattcctgtgcctgactgcaagctctcttctctcttcctctggtccgttttcctgttcttgtagcagtaccagtcttttcttttcgtttcttttcttttcctttctttccttttccctccttccctccatctttctttctttccttccttctttctttctttccttctttctttctttcttccctccctccttctctctttcttccctccctccttctctctttcttccctccctccttctctctttcttccctccctccttctctctttcttccctccctccttctctctttcttccctccctccttctctctttcttccctccctccttctctctttcttccctccctccttctctctttcttccctccctccttctctctttcttccctccctccttctctctttcttccctccctccttctctctttcttccctccctccttctctctttctccttccttccttccttccttccttcctctctctctctctctcttgctttcttgctttctttcttggttttgctgtgttcccaagctggagtgcagtggtgtgatcatggctcactgcaacctccacctcccaagatcaaggggtcctcccacctcagcctcccgagtagccaggagtaaaggcacatgccaccacacccggctaattttttgtatttttagtagagacaaggtctcactatgttgcccaggctcgttgtgaactcctgggctcaagcagtctgcctgctttggccttccactgtgttcggattacagatgtgagccaccttgcccagcgcatttatcacctttttttttttttttttgacggagtctcagctgggctggtgagcagtggcgtgatctcggctctctgcaacctctgccttccggattcaagtgattctcctgcctcagcctccggagtagctaggattacaggcgcctgccaccacacccagctatgtttttgtatttttagtagggacggggtttcactatgttggccaggctgatcttaactcctgacctcatggctctcccgtggcggcctcccaaagtgctgggattacaagcttgagccaccacccctggccactttatcttttagaaaatattttatttcatttttatgctatacctttgtaatagatcataatatctggtaaattggatttatcttcttcaatcttttattttaattttatcttaactttttttttaagagatgggatctcactttatagcccaggctggagtgcattggcatgatcatagctcactgcagccttgaactcctgggcgcaagggatcctcacacctcagcctcctgagtagctgggaccacagacatgcaccaccaggcctggtggatcttttattcttaaattgacctagcttttgatgaactttaattcttccaattagaataagatggttaagttcctacaaaataaaatgctagattttttattgaattgctttgaatatgttgattaatttagaaagaaatgagacctttataatattaagtcatctcattctagagtgttgaggggattttattgaaacaattttgtaatctttatagagattttcccctcgtctttgttagtatattctattattaatttgagacagggtcttgctctgtcacccaggctggagtgcagtggcatgatctccgctcactgcaaactccacctcccagattcaagtgattcttgtgcctcagcctcttgagtagctgggattacaggtgcatgccaccatacccggttaatttttgtattgttaatagagacggagttttgctatgttggccagggtggtcttgaactcttgacctcaagtaatcaacccgcctcagctttccaaagtgctagaattacaggcataagccacagcacctggcctcattatatattttaaaacattttttaatgcaaataggttaacacttttaaggagaccctctatatgttgtgttttgcttagaaatgcttctaaaaataccatatcaagttttctaatacttttgcgactttggttttctcatgcttaaatccttgattcttctggaattcattttgttattggatttagggtcagagggaggttggaattgcctttgcaaaaattataactgaggacatcatgacagtgaaagagaacagacctaatcgactccatcttgcttgtaaccttcaagctgtctttgttcattcctgggcataggctgaactaactttgggaaggaattcagttcttggtttgagtctgaaaccaaattgataatagccctttcctgaaaacaccccctgtcttgataaatcggctctttctaggcagcaggcaaggtgaattcactgggcggttacaagttggtgcgagggtctctctggactgcaggagggctgtgtttgccccctggataattgttgggtgttaccttagggatgacctggcccagttgcccttcctgaccatgtgcctgaaggagagcctgcggctgcattccccagtctccaggatccaccgctgctgcccccaggacggggtgctcccggatggccgggtcatccccaaaggtgcccacagttgggcaggcggggagggctttgggcagggtggaggtcccatcgtgtagtggagtccttgtcctgactgcacctcctccccgacagggaacacttgcaccatcagcatctttgggatccatcacaacccttcagtctggccggacccggaggtgctaccccttccgccttctccatcccggggcctggtcaggggaggggtcttttcccagggaagcagatactccctctctactccacccacatgtgtactttttttttgttttgttttttgagacgaagttttgctcttgttgcccaggctggagtgcaatggagcgatctcggctcactgcaacctctgcctcccgggttcaagtgattctcctgcctcagcctccctagtagctgggattacaggcatgtgccaccacgcccggctaattttgtatttttagcagagacggggtttctccatgttggtcaggttgatctcgaactcccaacctcaggagtttcgcccctcagcctcccaaagtgctgggattacaggcatgagtcaccgtgcccggcttcacatctgtcttatatgcgggtggctgggtgtcctgagagacccccacccaacagccctaacttgcccacccaccaggtctatgacccctttcgcttcgacccagaaaatctccagaagacatcacctctggcttttattcccttctcagcagtgcccaggtgaggctaaggggcttctgaggcgggcatcgggtgagggtgccacaggtggaggcaaggtctgacttgtggggccacgtgtttcagggagtcgagggttttaataagatcccaggaaaagggggtgtgtgttctcagacttccccactcctacgtctgctggtctgggggctggagtctaagccaggctcggaggatatgcaagcccacatgggggtcccaggcacagagtccctctctctgcccctcaatcggatctgggtggggttgggagtcccagacgaggttcccggcgcgatggggccgggatgggggtcctgggcacagtcagagtccccaccccctcccccgggaactgcatcggccagacgttcgccatggctgagatgaaggtggtcctggcgctcacgctgctgcgcttccgcgtcctgccggaccacgcggagccccgcaggaagctggagctgatcgtgcgcgcggaggatggactttggctacgggtggagcccctgagcgcggatctgcagtgacccaccactgtcaggtctcagagccacccgcgccctcctcaggcacctttgcagattccggggaatcaatctgtgcctgagtcccacagacagccagcagggggcgtcggagaactgcagggatccagggcctggcgaggggaaggcggagtatttctgagccaagaccctgacagcctctctggttgagcacagtggccccgtgctgagggcgggttgtcccagagcgcaggtggggacagtatcctgtgggcgatagggagccatggcgggtgtttgagcaggagagggaccagggttgaggaggcacctatggggcaggtttgaggctctgagtcactgaggaaaaccagagcggcactacatccccgcccctcgatctcaattctcatctcctaatacatccagttgttttttttcctctcacctcagggttcttcaccgttttcattgttcttaaacgactgcacttattaaacaataataagcctggttgttttacagtgtgtctgatcattgaaagtacctgtatctattacaatgactgtcatttttgtcatggggtcagtgtttcggttatctttgcctggtattggctgccatatttgcatattagaaataatattcgtaggatttaaagaaggcagagttctctctctcttttttttttttctgaaacagagtcttgctctgtcacccaggctggagtgcagtggcaagatctcggttcactgcaacctctgctcctgggttcaagcgattctcctgcctcagcctcccaagtagctgggactacaggtgactgccgccacccccggctaattttttttttctttttttttgagacggaatctcactctgtcgccctcgctggagtgcagtggcgtgatctcggctcactgcaagttctgcctcccgggttcacgccattttcctgcctcagcctcccgagtagctgggactacaggcgcccgccaccacgcccggctaattttttgcatttttagtagagacggggtttcaccatgttggccaggctggcctcgaactcctgacctcaagtgatccgcctgccttggcctctgaaagtgctgggattaacaggcgtgagccactgtgctcagccagaagaaggcagctttgtctagggagcagtctttggaggactgctggttgaggtttatgttcatgaccctctaggcttgtggtgaccaaggtcacccaggaggtttaaatttaagctgaaatcacacttgcaagctgttttgctttatttttttctcactctgagagatgtagccctttgaggtctccacatatgcaaggaggggatttttaccattttccctccttgtatcacacctaggcttagaattttttttttcctgcaatcacaaaaccgttaaaagagtttcaaattttcctgatttgagaagtgccttcagagagaaggtatagtttatattcactttatctctaggtttctgttattatttgaatcatgtttttgtgatttttcactcttctttttttaaaaaaattattttattttaagttctgggatacatgtgcaggacgtgcaggtttgttacataggtaaatgtgtgccatggtgatttgctgcaatgtgactgcagcaatgtgatttgctgcatggtgatacctacccatcacctaggtattcagccccacatccattagctgtttgtcctgatgctctccctcctcctgcccccaccacaggccccagtgtgtgttgtacccctccctgtgtccatgtgttctcattgttcagctctcacttatgagtgagaacatgcagtgtttggttttctgttcctgtgttagtttgctgaggataatggcttccagctccatccatgtccctgcaaaggacctggtcttgttcctttttatggctgcataatactccatggtgtatatgtaccacatttcctttaaccagtctatcactgatgggcatttgggttgattacatgtcttcgctattgtttcactgtcttttcatgtcatttatttatatgaagaattgaagaagcatctaccttttttttttttctttttttgagacagagtctcattccattgcccaggctggagtgcagtggcttgatctcggctcactgcaacctccacctcccggattcaagtgattctcctgcctcagcctcctgagtagctgggattccaggctcctgccaccatgcctggctaatttttgtatttttagtagagatggggtttcaccatgttggccaggctggtctcgaactcctgacctgaagtgatccgcccaccccagcctcccaaagtgctggggctacaggcgtgagccaccacacccagctgcatccagctttttaaaaatgctggaattttgatccaaataacttagtttgctattaatggaagcaacaagtgtaaaacagaatgttaaattgtcatgatccagtgattgctccactctgggatgcgttagaactgataattgctattaaatttatagatttccacaccacacaagcccacatcaaaatgtgaagcagagtaccgcacatcaaggccgagtgcagtggctcattcctgtaatcccagcactttgggaggccgaggtgggtggatcacttcagatcaggagttggagaccagcccgaccaacatagcgaaaccccatctctactaaaaatgcaaaaatttgctgggcatggtggcacgtgcctgtagttccagctacttgggaggctgaggcagtagaattgcttgaacctgggaggtggagattacagcgagctgagactataccactgcactccagcctgggcaacagagcgagactctatctcaaaaaaaaaaaaattaaaaaaagaactgcacatcacccagaaatcctggactttgagctggcaggagggagcagatggaatttggatttgatttggcctcttgattgatctctgttttcagaacagaccccacggtcacgttccagctcctctcactctgctaatgtctttcattactgccaccatctgacttgcacttatgcaacccaactcttccccttctggagccaccttcctcttgctccctttcactaagatgtcccaacgggccatgttgcccaacccggataaaaggtggccgctcacttcccctttcagaagccgactcttgtccgtttctctccaccataccctgccctctgacttaggcctgctcttacctttgggggatgcggcctcggtgtgttcatttgtaaatggcaagattgatgggcctgttcacaagggcagtgggatggtgcacaggacacactagtacagagcctggtgcagaagctgctcccaggtgggagccaccatcctgatggacagttagggtcacctctgctcctctgcaggctgctgagaagggaaggttcctatgtatagacccttttccatgagaggaactgaagcccgggtggaccagccagaacatgaaaggatttggggaccagccctagcgcatatcctgaggccacactgctgcccacaaactgcccttgtggagcccactccatatgactctccatgggctggaaccactctcaggaaaagaatacatttcctctcaagccaaaacagacctctctgttggcagacagtgtgtcttctccctctgccctggaatgcacccttggggcttggagatgtccctgatacagaaggaacaggaggaagcagagcttccctttatccatgcagaatctagacactgtttactgctgaggctgcaccacagccagaggctgcaggcagacctgcgatcttagggttctccttagaatcagaatcaatagaatatatctctatctatgtttgtatctatccatctatctggaaagggaggtagagtgaatagggaatttattacaggaatcgtctcttgtgattagggaggctgagaagttctacaagatgctctctgtaagctggagaactagggatgcctggtggggtagctgcatctgagtccaaaggcctgagaacctggagttctcatgtccaagggcaggagaagatggatgtcccagctccagaacagagagcaaattcaccctctgcctttagatctatccatggagttgcagcaaactccttcaaagagtgacttatctttgcagagtcaaaggttgttttttttttttttttttttttgagacggagtcttgctctgtcaaccaggctggagtgcagcggcgcgatctcggctcactgcaagctccgcctcctgggttcacgccattctcctgcctcagccttccgagcagccgggactacaggcgcccgccaccacgcccggctaattttttgtattttttcgtagagatggggtttcaccgtgttaaccaggatagtctcgatctcctaacctcgtgatctagcagcctcggcctcccaaagtgctgggattacaggcgtgagccaccgcggccggccagtcaaaggtttcttttcccactccacctaggctttcagcttcctctaaggggagtgatggtttatgaaagagagagtgagtggggaggcagagggccagtgggcctctaggattctgctacacctgtgtatgtaattctagaaacattctcagggctgtgcgcagtggctcacacctgtaatccaaggactttgggaggccaaggcgggtggatcacgaggtcaggagttcgagaccagctcatccaacatggtgaaaccccgtctctactaaaaaatacaaaaattagccaggcgtggtggtgcacgcctgtagtcccagctactcgggaggctgaagcaggagaatcgcttgaacctgggtggcggaggttgcagtgagccgagatcctgttactgcactccaggctggcaacagagtgaaactccacctaaaaaaaataaaaataaaaataaataacaacaacgacaacaacaacaacagcaacaacaaaacgtactcaggcctgctcaggcctggtcttgtcatcggttgctgtggggcctccttcctctcttgaatgtgaaggaggcaccactggacagtttggggagaacagactcccaggtgtctggattattagtttgtctctgtgtttgtttgtgtgtgtgtgacagagagagagagagagagaggatgtgtgtgggtgtgcgattgtaggtgtgtgtgtgactgtatctgtgggactgcattcacagcgtgtgcaagtgtgtttgtgagtgtatgtaattgtgtgcatgggtggctgtgatcacatgtgcatatgtctgtattacaccgtgttggcgactgagtgtctgagtgtggtatgcatgtgtgagtgtgtgtatgttgttgtcactgagccactgtagctgtctacaccaggctgtgttcctattcatgactggagccactatcacagccactgtccttgaccccaggcctgacccttgcagtgcaggcagcacattctcatgcccttgaccccacatctgacccttgcaatacaggcaacacattctcatgcccttgaccttacatctggcccttgcagtgcaggcagcacattttcatgcccttgatcccatgtctgacccttgcagtgcaggcagcacattctcatgtccttggaagcagccctcaacaatgggtggtgagtattggtgggtaaatgccccagctccttttccctgagtgggatgactctgaggtgcatgttctatgctgtctcccagaggtgccatggagggctgagccttggctgcccatggtggaaactattttaaataagttccttttaattgctacatttcctttcctgtctcagttttcagctgtcctactggtgtttcctggacttacctcccaaacaaacaactggcagttgaaatttggtcacctctaaataaattatttgcacttgaatccttgcatcagggtctacttccaggaaacccaaactaagacaagcatgtctgctggcttctcccatctcaataggcttatcactgtgtcctttgtactgaagaggaacatgagattcagagaagacaagtcacttgcccaaagtcacacagctgattagtggcaggtccaggtttgaccatgggccacctaatcccaagcttggtgcttgctcctctcctgagagactccaccctactaaaggccagcggaaacaacataggaagttcgaagccatcaagggctttgctgcatgtgccagagggaaccaaggctcatagctggtgtctgtgtccttgtcctgtcattagagtaataatggcatgcacatgcttgtggctgattatgtgccagggaatgttgttgtaagcactttactcttttaaactcccttaattttcacaacaaccttgctatgactcctggttttcaggcaagaaaactgaggcacagagaaataaagagactggcccaaattcacacagctggttgagagttgaacgaagcagcctgcacctggagtccctgttcttcaccacgacactctctggcttctcacaagtcatatagatggagttctactaaatgtcaggcacgatgctaagcaatttcttttttgtttttgtttttgagacagtgtctcgctctgtcacctaggctggagtgcagtggtgcaatcttggcttactgcatcctccgcttcctgtgttcaagtgattctcctgcctctgcctcccaagtagtggtgattacgggcatgctccaccacccctggtgaagttttgtatttttagtagagatggggtttcaccatgttggccaggctggtctcgaactcctgacctcaggtcatccatctgcctcggcctcccaaagtgctgggattacaggcgtgagccaccgtacccgaccagcaatttcttttaaaatataatttgtaattatatatattagtaattataattaaacatgctgtacaacctcatataataaaaggaaacaattgctaagtgtaagcattgagaacaagaattctcccttcaaccccctgctcccattccgacagctgggagaatgcttatgatgtgcttatgtaaacttcagcacccacataactggtgtgttgagaggtcccatctttttggggaacgtaacactcgggtcctggcagggaacccacaggggctaaaggagggggtttaaggaggagccgtttgcaaaggtgtgggcagggccaaggggaaccatgagggatggtgcagcaccctggaggttaccatccaccgagagctgtcaccactcccaggctggtggtgccaggaaacagctgctcctggaaccaagatctgtggctgaaagaggagggcagaggacagacctcattctgctctccccactgatcatcagtggatctcccattgaccaaactgccatctgcttatatgactggagaggctgcaggcaggtgtccaaagcctcctgttgtggttcattcctgacaacgggtcagtgctggtccccccgatcccacagactgagatccactcagcttctctgccttgggtggcccccttgttcactgactaggcaggcacttgaatgaggaacaatattctgtctctccctgtactctcctcttttccctgtcacagggagggtctctgttgttcatgtcctgagtccctccatctagggctggtggctggtgttacaggaccaccaggttcatatccctgctgtgcaataacagaaaatacactgagacagaagtgtttgcagcagagaaaaagtttaatgatcacagggtggccgagctgggagacggaaggaactctcaaatacatctcccccaggagttctgggctggagtttttaaggactccatggaggatgagggattagaaaatgggggtcactgattggttgaagaaaggaggatgaaatcatcaagatgtggaaacttccttctttggtgagtgagcccctcatggggggctggctatgattcatgacctttattgtggtaaatggcactcaggaagcactttggcttgactatcaggccaaattttatcagcaccacgggcaagtttgcaggacgactcgttcctgtttaccccatgcaccccaagggaaattgctgaagtttctgtttatcttggtacaactaaagaaggatgcaagaatggacaaacttttttggccactcatttactcctcccgctgctgggtctttacacacctggcatgatttcatgggctggttcttatccacaggtgactcttccacatcactcaggtttctgctcgaaggtcacctcctgggggccccctgcctgatcaccgtgtccagaacagcccccttggtccctttctatctattcctgcagattaactgatgtcagtagtttccctgatatgcaaaacctgaaagaatatctcaaatggagaactcacatttcacaatgcttgagacgctgtctctagggcagttgaagaagtctataattttgtgacagggtctatgtgattctaaggcaagaagcagcaaacagctatgagggagcagtcagagaacaagctgacgtaatgattaatgctgaatgtgctgcagacttggttcattttttttcctcctcccttcttccatgattaattttataaagtgtataggtgatatggttgggctgtgtccccacccaaatctcctcttgtagttcccacaatccgcatgtgtcgtggaaggtacccgggaggtaatttaatcatgggggtggttactctcatgccgttctcatgatagtgggtaagttctcacaagatctgatggttttataaggggcttttcccccttttgcttggcacttctcgttgctgctgccatgtgaagaaggacatgtttgcttccccttccaccatgattgtacgttttctgaggcctccccagccttgtggaactgtgagtcaattaaaactttttccttattaaattaccctgtgtctttattagcagcatgaaaacagactaatacaatagggatgggtcactggtgagggtgctggggtcagctgttcaggaccagcaccacccaatagatcccacccatgaggggttgataccaactcttatgggtcatctggacttttctgaaactttcctggggctgtttttctccagctcatctgatctcctgttgcctctggcaaggtgctagccagtcagtctagctctggacatgccttgggaggctggctatgattcatgacctttattgtggtaaatggcactcaggaagcactttggcttgactatcgggccaaattttatcagcaccacgggcaagtttgcaggacgactcgttcctgtttaccccatgcaccccaagggaaattgctgaagtttctgtttatcttggtacaactaaagaaggatgcaagaatggacaaactttttggccactcatttactcctcctggtgctgggtctttacacacctggcatgatttcatgggctggttcttatccacaggtgactcttccacgtcactcaggtttctgctcaaaggtcacctcctgggggtcccctgcctgatcaccgtgtccagaacggcccccttggtccctttctatctcatctcactcttgtaatttctttcatcaccgtcaccattggatttggtcttatgatctgttggcttcctccatcagacaggaacaccaggttggcagtgttgactgaaattaaggctttgaggcagaaataattcaataaaggtttattggaagtcaaatgtgaggattgattgaggaagacacagtaatgaaattgagcatgctttaaagccttttataaattggaatgtttttgtgagaaggtttaggagaagggaggggaactcaaacaggagttgtatgtttttctttcccttccttctttccttcctttcttcctttctctctctctttttctttctttctttctttcttgttttgagacagggtctcactctgtcacccaggctggagtgcaatggcacaatcacagctcactgaagcctcaacctcctgggctcaagcgatcctcttgcctcagcctcccaagtagctaggaccacaggtgtgcaccaccaagcaaggttaattatttttttttgtagagacaggatctccttttgtttctcaggctggtctcaaactcctgggctcaagcaatcctcccacctcagcctcccaaaatgctgggattacaggcatgagccactgtgcctagctggagttgtctttttcattgcagggtataatatagagattataattattggctacaaatgacaacatataggctagaacattaatatatgtaaaacaatctgtacaactttatgatttagaaacaaatttgtgtctttttcaatgtcagtaggttacatattaagcatgtcgacagtttgaggaactcaggataaaatttgaggctggctatgattcatgacctttattgtggtaaatggcactgagtaagcacttggcttgactatcaggccaaattttatcagcaccacgggtaggtgtgcaggacggctggttctgccatgcattatttttcattcagggacaggaggtaaacgacgaatcataagatcttcctgggacggttactttggaagcctgccaaaggtgacttgtagattattagttctttggatagagaatcttttcaaggaagcagtgatgaccaatctctgttcaggttagagtaacaggggttatttatctttcgccattgggaaggctcatttgtaagaagtcatgtctttccaggctgaggagataaataattttgttattgcaggcaggtgaaattgttagtgacatggggcaggtcatgacttgaggctctgtgttttcttttgaattgcgagtcatatctagttgttgggcaaccattattttggtgttagctgttgatgaatagttttaaaattctagagaatttaggtagagagaaaggtaaatgttttaattttgtttataaaattgtgttttatccatttgttgtaagacatacatagtttaaaagaaaaaaatttttttattttggaaaacaatataaaaataattagcattgtgttaaatagaagctcatataaatcataaggaatggtaccagttcctccttgtacctctggtagaattcagctgtgaatccatctggtcctggactctttttggttggtaagctattgattattgccacaatttcagagcctgttatgggtctattcagagattcaacttcttactggtttagtcttgggagggtgtatgtgtcgaggaatttatccatttcttctagattttctaatttatttgcgtagaggtgtttgtagtattctctgatggtagtttgtatttctgtgggatcggtggtgatatcccctttatcattttttattgcgcctatttgattcttctctctttttttctttattagtcttgctagcggtctatcaattttgttgatcctttcaaaaaaccagcgcctggattcattaattttttgaagggttttttgtgtctctatttccttcagttctgctctgattttagttacctcttgccttctgctagcttttgaatgtgtttgctcttgcttttctagttcttttaattgtgatgttaaggtgtcaattttggatctttcctgctttctcttgtgggcatttagtgctataaatttccctctacacacttctttgaatgtgtcccagagattctggtatgttgtgtctttgttctcgttggtttcaaagaacatctttatttctgccttcatttcgttatgtacccagtagtcattcaggagcaggttgttcagtttccatgtagttgagcggttttgagtgagcttcttaaccctgagttctagtttgattgcactgtggtctgagagacagtttgttataatttctgttcttttacatttgctgaggagagctttacttccaactatgtggtcaattttggaataggtgtggtaaggtgctgaaaaaaacgtatattctgctgatttggggtggagagttctgtagatgtctattaggtccgcttggtgcagagctgagttcaattcctgggtatacttgttaactttctgtctcgttgatctgtctccaatccatagaaaaagagggaatcctccctaactcattttatgaggccagcatcatcctgataccaaagccgggcagagacacaacaaaaaaagagaattttagaccaatatccttgttgaacattgctgcaaaaatcctcaataaaatactggcaaaccgaatccagcagcatatcaaaaagcttatccaccatgatcaagtgggcttcatccctggaatgcaaggctggttcaatatactcaaatcaataaatgtaatccagcatataaacagaaccaaagaccaaaaccacatgattatctcaatagatgcagaaaaggcctttgacaaaattcaacaaccttcatgctagaaactctcaataaattaggcaatgatgggacatatctcaaaataataagagctatctatgacaaacccacagccaatatcatactgaatgggcaaaaactggaagcattccctttgaaaactggcacaagacagggatgccctctctcaccactcctattcaacatagtgttggaagttctggccagggcaattaggcagaagaaggaaataaagggtattcaattaggaaaagaggaagtcaaattgtccctgtttgcagatgacatgattgtatatctagaaaaccccatcgtctcagccccaaatctccttaagctgataagcaacttcagcaaagtctcaggatacaaaatcaatggacaaaaatcacaagcattcttatacaccaataacagaccaacagagagccaaatcatgagtgaactcccattcacaactgcttcaaagagaatgaaatacctaggaatccaacttacaagggatgtgaaggacctcttcaaggagaactacaaaccactgctcaatgaaataaaagaggatacaaacaaatggaagaacattccatgctcatgggtaggaagaatcaatatcatgaaaatggccatactgcccaaggtaatttatagattcaatgccatccccatcaagctaccaatgactttcttcacagaattggaaaaaactactttaaagttcatatgcaaccaaaaaagagcccacattgccaagtcaatcctaagccaaaagaacaaagctggaggcaccatgctacctgacttcaaactatactacaaggctacagtaaccaaaacagcatggtactggtaccaaaacagagatatagatcaatggaacagaacagagccctcagaaataacgccgcatatctacaactagctaatctttgacaaacctgagaaaaacaagcaatggggaaaggattccctatttaataaatggtgctgggaaaagtggctagccatatgtagaaagctgaaactggatcccttccttataccttatacaaaaattaattcaagatggattaaacgttagacctaaaaaccataaaaaccctagaagaaaacctaggcattaccattcaagacataggcatgggcaaggacttcatgtctaaaacaccaaaagcaatggcaacaaaagccagaattgacaaatgggatctaattaaactaaagagcttctgcacagcaaaagaaactaccatcagagtgaacaggcaacctacaaaatgggagaaaattttcgcaacctactaatctgacaaagggctaatatgcagaatctacaatgaactgaaacaaatttacaagaaaaaaacaaacaaccccatcaaaaagtgggtgaaggacatgaacagacacttctcaaaagaagacatttatgcagccaaaaacacatgaaaaaaatgctcaccatcactggccatcagagaaatgcaaatcaaaaccacaatgagatatcatctcacaccagttagaatggcaatcattaaaacaacagttgctggagaggatgtggagaaataagaacacttttacactgttggtgggactgtaaactagttcaaccattgtggaagtcagtgtggtgattcctcagggatctagaactagaaataccatttgacccagccatcccattactgggtatatacccaaaggactataaatcatcctgctataaagacacatgcacacatatgtttattgcggcactattcacaatagcaaagacttggaaccaacccaaatgtccaacaatgatagactggattaagaaaatgtggcacatatacaccatggaatactatgcagccataaaaaatgatgagttcatgtcctttgtagggacatggatgaaattggaaatcatcattctcagtaaactatcgtaaggacaaaaaaccaaacaccgcatgttctcactcataggtgggaattgaacaatgagaacacagggacacaggaaggggaacatcacactctgggggctgttgtggggtggggggagggggagggatagctttaggagatatacctaatgctaaatgacaagttaatgggtgcagcacaccagcatggcacatgtatacatatgtaactaacctgcacattgtgcacatgtaccctaaaacttaaagtataataataataaaatttaaaaaaaggtcaggaaacaacaacaataacaacaacaacaacaacaacaacaaaaagaaggtcatataaatcattttagtcttttatcatttcggtctcctataatttttattgtgtttgatgttggattaataatctttatgcataagtttttattggagttttgaacgtttttatttagtctatagatcattaaattattggaaatctgtgttgtagagtcttttataagaaaagtaattttggactgggtgcagtgactcatgcctgtaatcccagcactttgggaggccaaggcggatggatcaattcaggccaggagttccagaccagcctggccaacatggtgaaaccccgtctctactaaaaatacaaaaattagccatgggtggtggtgtgcatctgtagtccgagctactagggaggctgaggcaggagaatcacttgaacctgggaggtggaggttgcagtgatcatgccactgtactccagcctgggaaacagaatgagactctgtctcaaaaaaaaaaaaaaaaaaaaaaaagtaattttatactagagttggttgcaaatgtttttgggccaggcatggtggctcatgcctgtaatcccggcattttgggaggccaaggcggatggatcacctgaggtcaggagtttgagactagcctgggccacatggcaaaaccccatctctacgaaaaatacaaaaattagctgggcatggtggcggggacctgtactcccagctacttgggaggctgaggtaggagaatcgcttgaacctggaaggtggaggttgcagtgagctgagatttcgccactgcactccagcctgggcgacagagtgagtgagactccttctccaaaaaaaaaaaaaaaaaaagataatgaccagaattatcatgggcagcagcatcacatcagaatcatcagacttttataaattttatataatctttaggatatttatatttataacatttatataaatctaattttagaaaggattaacataattaaaattatgactgcaaatatattagatatttataaatttaaataatttttggaacatttatatcaataacatatttataaacatgactgaaggatctagtattatttatcatttgacaacatttttaatataatttttcaaatctaattatttaatctataaagacttattttaggattttgatcttggagaaacctgtaaaagatataaaaagatctaaacaccttgtcaaattagaatcataggccaggcatgggggctcacatctgcaataccagcactttaggaggccaaggcgggtgggtcgtttgagctgaggagtttaagaccagcctgggcaacatggtgaaacaccatctttacaaaaaatacaaaaattagctgggtgtggtagtgcacaccagtagtcccagctactcaggaggctgaggtgggaggattgcttgagcccaggaggttgaggttgcagggagccaagattgtgccactgcactcccgcctgggcgacagaacgagactccgtctcaaaaaaaaaaaacaaaacaaaaaaaacaaaacaaaacaaattaaaatcacaggtctttgtaaaataatatttatttaactagagtgatgatcaaaagactttacaagcaatagagaaaattatatggacgtgaaaatcttaactgttttattttattaatttatttttgagacagggttttgttctgtcacccaggctggagtgcagtggtgcgaccatagctcactgtagccttgaccttctgggctcaatctatcccactgcttcagcttcctgagtagctgggactacagatttacttccccacacccagcttttttttgtttgttttggagagacggggtttccctatgttgcccaggctaatcttgaactcttgagctcaagcaatccacctgcctcggcctcccagggtgctaggattataggcgtgaggcaccaggcctgtcctaactcttttgcagcttagtcttagtaagtaattaaaaatctgataaagataacacagaaattatttcaataacatgtaaactttttgtttttaaggccaatgaccaaaatgtaaagacaaacctcttgtagtgtgattgtggttttttttttgagacagaattttgctctgtcacccaggctggagtgcagtggcaccatcttggctcactgcaacctctgcctcccgggttcaagtgattctcccgcctcagcctccctagtaactgagattacaggcatgtgctaccacatcaggctaatttgtttttgtatttttagtagagatggggtttcaccaagttggccaggctagtctggaactcccgacctcagatgatccacccaccttggcctcccaaagtgctggaattacaggtgtgagccactgcgcctggcctgaatttttatttttagtaaccttaaattttagtggaaacttagaaagtaagatcttgagttgtctgtcacaaattagtatgttaaagagatgagctactttataatgtttagaaacatgtttttttataatataattttttcttttctttaacttttattttaggttcaggcgtacatgtgcaggtttgttacacaggtaaatggcacattgcaggagtttggtgtacagattatttgatcactaaggtaatacacatagtacccagttggtagtttttggtcctcaccttgcttcccaccctccaccctcaagtaggccttggtgtcgttgttcccttctttgtgtttatatgtcctcaatgtttagcttttatttataagtgagaacacacagtatttgcttttctgttcctgtgttagtttgcttaggataatggcctccagttccatccttgttgttgcaaaggacatggtctcattctttttttatggctgcatagtattccatggtgtatatgtaccacatgttcttgatccagttgatggacatttaggttgattccatgtatttgctattgtgactagtgctgcaatgaacatacatgtgcatgtgtctctatggtagaacaatttctattcctttgggtatatacccaataatgggattgctgggtcaaatggtaattctgttttaagtcctttgagaaattgtcaaactgcttcccacaatgcctgaactaatttacatccccacaagcagtgtataagcatttccttttctccataacctctccagcatgttattactatatatataatttttactttttaatcatagtcattctgactggtgtgagatggtatctcattgtggttttgatttgcatttctctaatgattagtgatgttgagcattttgttgtatgctttttggatacgtgtatgtcttcttttgaaaactgtctgttcttatcttttgcctacttttttaatgaggttgcttggtttttccttgtaaatttaagtttcttatagattcttggtattagacctttgtcagatgcatagtttgcaaatattttctcccattctgtaggttgtctgtttactttgttgatggcttattttgctgtgcagaagctctttagtttaattaggtctcatttgttgatttttgtttttgctttgttacaattgcttttggcgtcttcatcatgaaatctttgcagtcctatttccagaatggcatatcctaggttatctttcagagtttttatagtttttggttttacagttaagtccttaatccatcttgggttaatttttgtgtatggtataaggaaggggtccagtttcagtcttctgcatatggctagccagttatctcaacaccacttattgaatagagagtcctttttccattgcttgttttgtcagctttgtcaaagatcagatggttgtaggtgtgtgaacttgtttcttggctctctattctgttccattggtctataggtttgtatttgtaccagtaccatgctgttttggttactgtagccctgtagtatagttgggtaatgtgatgcttccagctttgttctttttgcttaggattgccttggctgctcaggctatattttgtttccatatgaattttaaaatagttttttctaattctgtgaaaaatgtcattggtagtttgataggaatagcattgaatttgtaaattgctttgagcagtatggccattttaacaatattgattcttcatattcatgaacatggcatgtttttccatttgcttgtgtcatttctgatttctttgagcagtgttttgtaactctagttgtagaggtctttcacctccttgcttaacagtattcttagttattgggccaggcgcggtggctcatgcctgtaatcccagcactttgggaggccgaggcaggcggatcacgaggtcaggaaatcgagactatgctggctaacacggtgaaaccctgtctctactaaaaatacaaaaaattagctgggtgtggtggcgagcgcctatagtcccagctactcgggaggctgaggcaggagaatggtgtgaacctgggaggcggagcttgcagtaaacctagatcgcaccactacgctccagcctgggtgacagagcgagactctgtctcaaaaacaaaaacaaaaaaacggcattcttagttattttattcttttgtggctattgtgaatggggttgcattcttgatctggctctcagcttggacataattttttcttaattagaaatgacccagatgtttaatgagtatctattatttaatttaacataactttaagattttgaattacacaaaaagtttttaataagcatttatctcatttatgcttacccaatttatttatttttaataggttgactagactatttatgaaaacttagatattagacaaagttagtcattatcaaaagttatgtatggttatgttaaacatttttatagcctgtgattatcaggtgttcacccgagtgagaaacttaaattaaaatatgggtattttgtcaacaactcagaagatttagctgtttttattaagctaacaatattaaatgtcttatttattaaaattgcacaaacaaagatcatttggttttgaccagatttatagtcttataacctttgtgtcaaacccaggcaccttaaaatatctagtggagagaaatacaaaactttctgaccagtaaactcagacaaaaatgtacgttgacaattttaaagacatttaaatgtttatcttatcaataatttgaacatcaacttatttattaaagacttctttaagtcatataaacttggaacatacttgggtttagtaatttatgagcactcatctatttataagtcagttttgtagcatatagatacaacatataacaatatatgtacatatatttaaacacatctaaacaaacatatacacacacataaagactttatagtatttattttagaattttagtcatgagagagtagcataaacttactagtttataaaagacagttggatccatattacagatgacaaaattggaacttgtttacatggcttaaactttgtctcaacagataacttaatgaaggctgtggatcaaaattttgggtaaagcaattcttatggcagtttgattttaaaaacatcttctgccccttttttctttagttctaaatgatcttagggttaacattttaatgtttatattttagttagaactgtctgaattgtcaaaaacacacacacacacaaaatctctaagtaattttgcattagcaataccataaacagtgagctttatctcaataccagtagaaaagttagcagatttaaagtgggcagaaaaaaaaacagagaacttagaaggctctgtgtgctaactctaaagttataagttgaccatctgagctctgaattccttttctttttctttttttcagaaggagtcttgctctgtcacccaggctggagtgcagtggcacgatctcggcttactgcaacgtccgcctcctgggatcaagtgatactcctgcctcagcttctcaagtagctgggactacaggtgtgtaccaccacacccagctaatttgtgtatttttattagagatggagtttcgccaagttggccaggctggtttcaaactcctgacctcaagtgatccgcccgcctcgtcctcccaaagtcctgtgattacaggcttcagccacctcgcccggccctgaattgttttagtgtaatctgtccatcaatttaaaatgtacagaagaaccagccatgatacatagccagctgtagtctcaaaaaaacctggcatatattaatgtttgagaattttattttgtttcttaatctcccagtttagaaaaaaatttttggatctgcattttttaatcttaagtttcattttctttttgtagttgttccatttgctcttttcgttttacatttatatatattttccccttttgagggaaggaaatgtgtgcattgtgaactcctaaaaatctctgcctaagagatatatgggagctgagtgaacaaggaaaaagggatgaactcatattgtttccggaaccaaactgggtctggctgcgttttcttgaggcccgataaggagaagcagacaaactaggaaagaaaggaatttattactgtaaccagacacagggagaaggccagagataattcaaacagaccaactcaaagagttacaattttcttagtgcttacataggttggggttatgtgcctatgtgccgtatatcattcgccttaagtctactggtaactaattttgtttcaactagaaggtcagaggcaaaaaatgctgtctaagtctgattaaaagggtcctagtaccttcaaggcctgtctactgtggtactggagtgactatttctttttctttctttcttttcttttctttttttttttgagacggagtctcactctgtcgcccaggctggagtgcagtggcacaatctcggctcactgcaacctctgcctcctgcgttctagtgattctcctgcctctgcctcctgggtagctgggattacaggcgtgtgccaccatgcctggctaattttgtatttttagtagagatgggggtttcaccatgttggccaggctggttttaaactcctgacctccggtgatctgcctgcctcagcctcccaaaatgctgggattacaggtgtgagtcatcgcgcctggcctggagtgattatttctatcttatctcctttacagcttgacccagagagctgccttagactctccaatgaatctattcaaacagctgcctctgttaccttgacttgtctcagattttgttacccgagatgggtcctggcactaggaatgtaagactgtctctattattttgacttgttccaggttagggagaagcctgtgcaaggctcctactgaccatatgtttcatttctagcttttatgtctgggcacctatttccctagtttggactatttgctcaatttttaaggcagctctgtggaaatctgtttgtgtaacacaagtgctatgcaggcctgtctgtgtgactgtcatgtaggcctggttgtgtggttgtcagggagaactctactgccacaatagcacacggggtaagaggaggggaaacagttggaggtttagaagcttctaagtcccactgaaagtctctcatttaatttttccggttctaagactagcaacttttttttttctttcctgaggggtgtctcgctctatcgcccaggctggagtgcagtggcgctacctcggcttactgcaagctctgcctcctgggttcaggtttacgccattctcctgcctcagcctccggagcagctgggactacaggcacctgccaccacgcgcggctaatttttttttgtatttttagtagagacagggtttcacagtgttagccaggttggtctcgatctcctgacctcataatcctcccgcctcggcctcccaaagtgtgggattacaggtgtgagccaccgcacccagccaagactagcatcttttttaattgcccacacaaataaatcacttaaggcatttcaaaaagatctccatttcagctattgttgcttataaccatcgtgggttaggcaggaccacttacctcagcacttgtaaatatgaagacttttaaaaataacttttcatggctgggtgcagttgtgtctggaattggtgggttcttggtctcactgacttcaagaatgaagccgcggaccctcgtggtgagtgctacagctcttaagggggcgcgtctggagtttgtcccttctgatgttcagctgtgtttggagtttcttccttctggtgggttcgtggtctcgctggctcaggagtgaagctgcagaccttcgcagtgagtgttacagctcttaaggcagtgcgtctggagttgttccttcctcccagtgggctcgtggtctcgctggcttcaggagtgaagctgcagacctttgcggtgagtgtcacagctcataaaagcagtgtggacccaaagagccagcagtagcaagatttattgcaaagagcaaaagaacaaagcttccacagtgtggaaggggacctgagtgggttgccactgctggctcctgcagcctgcttttattctcttatctggccccacccacatcctgctgattggtagagcccagtggtctgttttgacagggcgctgattggtgtgtttacaatccctgagatagatacaaagttctccacgtccccatcagattagttagatacagagtaaggacacaaaggttctccaaggccccaccagagcagctagatacaaagtgtccatggtgcattcacaaaccctgagctagacacagggtgctgactggtgtgtttacaaaccttgagctagatacagagtgccgattggtgtatttacaatccctgagctagacataaaggttccccacagccccaccagagcagctagatacagagtgtcgattggtggattcacaaaccctgagctagacacagggtgctgattggtgtttacaaaccttgagctagatacagagtgccgattggtgtatttacaatccctgagctagacataaaggttctccaaggccccaccagcctcagaagcccagctggcttcacccagtggatcccgcagcagggctgcaggtggagctgcctgccagtcccgcgccatgtgctcgcactcctcagcccttgggtggtcatgggactgggcgccctggagcagggggcggcgctcgtcggggaggctcgggctgcacaggaacccacggagacgggggaaggctcaggcatggcgtgctgcagtcccgaggcctgccccgcgggaaggcagctaaggcctggtgagaaattgagcgcagaaccggtgggctggcactactgggggacctagtacaccctacgcagctgctggcccgggtgctaagtccctcattgcccggggccagcagggccggctggctgctcccagtgcggggcccgccaagcccacgcccacccggaactccagctggcctgcaagcgccccgcgcagccccggttcccgctcgcgcctctctctccacacctccctgcaagctgagggagtgggctccggccttggccagcccagaaaggggctcccacagtgcagcggtgggctgaagggctcctcaagtgccgccaaagtgggagcccaggcagaggaggcgccgagagcgagtgagggctgttgggactgccagcacgctgtcacctctcgcagtggctcatgtctgtaatcccagcactttgggaagccgagggaggcggatcacctgaggtcaggagttcgtgagcagcctggccaacatggtgaaaccctgtctctactaaaaatacaaacaacaacaacaacaacaaaaaactagctgggcgtgatggtgggcatctgtagtcccaggtactcgggaggctgggatgctgaggctggagaatcgcttgaaccctggaggtggaggttgcagtgagctgagattacgtcattgcactccagcctggctgacaagcgcgaaactccgtctcaaaacaaacaaacaaacaaacaactttctccataacttttatgtataaacactggctgatgtacagtcagtcttaacaggacccatttcccatcctggttgttttgagtgagacaagctatgttgtggagcaagagtgccctaatgtgatcaaaaaatgataaaacgaaggaaagtttgtctctccccaaccccctagagaaaccattcacaaagatcctattttaccctgccctagaattcaacaaaaacccttaccttaaatttgtagcagtagctcttattctgagaacatcactgcacctcctagccaagggggaaagcagcttcaataaggcagaactttgcctaaaacaggaagttcgttgatttcaggagaaacttatctgttgcatccagcaggggcatcccagttgggggaacacgatggattccgtgcatgaaggttgaaacctgctcaggaaggtccagggtgaccagggaggccactctgaaacactgatgactacatcattttgtggagtgaaattaaagctgccgaggcagaaatactttgataagggtttatttgaagccaaaggtgaggatcaacccagaaagatgcaccaacacatttggatgtgtgccagaatcttttacaatttggaatgtttttataagaaagtttaggagaagagaagggaacttcttatatcagaattgtctgtttttattggagggtataatacagaggtcataatgattagatacaggttataacatacaggctaaaacattttgtatgtaaaaccatcagtgaaactttataagagagggcacagtggcttatgcctgtaatcccagcactttgggaggttgagacgggcagatcccttgaggagaagctcatcgctcctgaggccagtagttcgagaccagcctagccaatatggtgaaactctgctctactaaaaatacaaaaattagctgggcatggtggcacatgcctgcaatcccaacaactcgagaggctgaggcaggaaggttgcttgaacctaggagatggaggttgcagtaagatgagactgcgccactgcactccagcctgggtgacaaagaccctgtctcaaaaaaaaaaagaaaagaaaagaaaaactttatgatttataaatataaagcaaaacttcatggtttagaaacaaaggattgtgcttttccatatcagtggaaaatcagaacatcaacagttggaagaactcataagatctgagtaattaaagataagatttgaggaactcacaagattctttactcaggaacaggatgtaacccatgcatcaagagatcttttccgggggctaattgggactaatgtgactggtaggttatcagcagagaccacgtctgtcttgttcaacctgtgtcccaggtcctagcaccatgcctgctaccatttaagtgttcatgtgaagtttgttgttgagaaactaattacctaaaagttagaacttgacctttgcattttatcgaggaggctatgagactcagagggttacacagctagtgagtggcagagcctggacttgaactcagttgtgctgaagccagaatgtgttccttcctgagcattcaaggacagggaaggtgaaactccagctagtgggcagcccgtgtgcttgttctagggagactgcaggccgattcctgggagctgggtcttcatggtgacacagtaagaacaactcacctattggctgggcgcagtggctcacgcctgtaatcccagcactttgggaggccgaggtggttggatcacttgaggtcaggagttggagaccagcctggccaatatggtgaaaccctgtctctactaaaaatacaaaaattagctgggtgtggtggctcatgcctgtaatctcagctgctcgggaggctgaggtaggataatcgcttgaacctggtggggcggaggtttcagtgagccgagattggcaccattgccctccagcctgggtgacaaagtgagactctgtctcaaaaaacaaagcaaagcaaaacaaaacaaaacgaaacagaactactcacctatgttgtggatcaactgtgtccccactgtaccaaatccttatttatttaaaaaaatttgttttggacccttttcacaagatggtgccgaaagtgaagaaggaagctcctgcccctcctaaagccgaagccaaagcgaaggctttaaaggccaagaaggcagtgttgaaaggtgtccacagccacaaaaagaagatccacacgtcacccaccttccggcggccgaagacactgcgactccggagacagcccaaatatcctcggaagagcgctcccaggagaaacaagcttgaccactatgctatcatcaagtttccgctgaccactgagtctgccatgaagaagatagaagacaacaacacacttgtgttcattgtggatgttaaagccaacaagcaccagatcaaacaggctgtgaagaagctctatgacattgatgtggccaaggtcaacaccctgattcggcctgatggagagaagaaggtatatgttcgactgactcctgattacgatgctttggatgttgccaacaaaattgggattatctaaactgagtgcagctgcctaattctgaatatatatatatatatcttttcaccatatacatgcctctctgtcaatttctggttgggctgggaggccacacacagacactgacatgacagggcttgggcaagactcctgttctacttatccttttgaaatattcaccctgccactccaccatgtgtgatcactccagagatctttgtgactagagttagtgtcctaggaaaaccagaactcagaacttgcctccatggttgagggtaacaagaagctgtacaagaaccccttttatccctggaagaggctgtgtatgaaaccaatgcccagggtttgaagggcgttagcatccatttcaggggagtgtggattggctggctttctggtagcattttgtcctcacacacccatctactgtgtccaaccggtctgtctgcttccctcaccccttgcccaataaaggacaaggacttcagaggaaaaaaaaaattgttttaattattacatttatagcatcccagcttgaaaaacgaagcaacagagacgtgtagaaagttaaaaggtttctactccaattgtaatttctccaattccatcgtggtatgtgcattcttctggatttttttcagtgtgcatacacatgtgtacatacagacacatacacatacactcgtacgttttttatattgatgggaccattactcacatctttaatttggaacttattctctgctctctctccctgtgtctgatagaatgctggcaatgctttgtgatgctttaggagacacatttgtcagatgtgaagacttaggcttaggaattgatgggtggtgactgaggctggtcactctgtggtctggtgcactttcccactgccccactctgggtaggggtggaagggcccctgcagagaagcaccagcttctgttttcccatgagtgactcccctccctccaatactcactaggggactttccataagccaggctgtgtgatttggcccctgagatattcctggttggatgagaaatcttggggagactccagccttctcaggcacaaaactcccagagtagagagctccctctggactatctctcctgcccttggcctcaatttcctgttctgctacctggtccaggaatcaggacctcagtgatgaaacttggcttctcccaggctgcagagtcctgctggggtgtgagtccttgctcatggctcatgaaagttcaacatatgcttatggcttcaatattgggccagatttcacttcccaccttggccttcccaaggatgaattgtgtggtcccatgtgttggtgatctcagcatgaactgcaaaggaagaagaactcatgtgcatttttgcgcagctgggtgccgcatcccatggctgcccttggagggtctccctcttcattcatgtctctgctaaaaggtcacctcctcctggaagccctccctgattctctgatttattggattgtctgatttattggatcattgcctgtctctttacgtgatgtgatacctttgacagctgagcactcactgttgcatccccagtgcctggcacatagtaggtgctcaagaaacatatagttgcatgaacagccctgagaggcatagatttttctttttattttataactgaaagaagccctgagaatcagaaaggttaaggggttaactcccagcatccctgcaaagcctggagccaggaatcttaaaacaagtctacttaaacttgaaggattgtatagggatttcctggggttctattaagatgcaatcctgagttagtatttctggattggggcatgggattctgcatttcctgccagctctcaggtaatgctcatggcgcaggtccctggaccacactttgagtaactgagccttacagttaaagtgcatgttgccagctccttcccttcacctcctctttttgaggctctttcctctgaagactcctcctctgtccccctctaaagcccctcattccacatcccatctcccaaatgcaaaatctgagctcacagcaatttgggaggccgaggtgcgcagatcacgaggtcaggagttcgagatcagcctggccaacatgtgaaaccctgtctctactaaagatacaaaaaattagctgggcgtggtagtgggcgcctgtaatcccagctactcgggaggctgaggcaggagaatcgcttgaacccaggaagcagagtttgcagtgagccgagctcaccctccatcccgtcgcgccaatgcactccagcctgggtgacagcgcaagactccgtctcaagaaaaaaaaaaaaaaaagcctgagcccaggaggggcagtactgcccatcatcaaagcaaggacagagcagaaggagactccactcagggtcccctggctctgccttccactgtctcgacctcgtctgctctcagcttccctcagcgttacccttcacaggccccctctgtcctcctatgctgagcccagcatccaggttgctttcccagctggtctcgttatctccagaatctgaccctgggtaatccccagtggtgctgcattctttgttcctgctcctgtcagtcaggtctcagcctaggtcctgggctgctgggaggcaggacttgaattcctgccaggctggcagtggagggcaacaggcttctgtctctgaatctcctaaatctgcactgagaaatggtgcacagcattctcctggcccacatttggaggggaacttgggggatgttttgggagaaggcttggcctcacccagctcacctggcatctgaacacttcattcctttacctaccttcccctggtcttggaaaggcagggtggctgcacattttggggctcagatcaccattggctgccctccaacttaccctctgccttacatgagaggtaccaaggactgagtggccatgctcggtcaccctgaattggttcttctacagttatggtccccaccagtccccgggttttggttggctgccctggcacaaaggaggcatccaggctgtgaggattggctagtccagccccgcccagcctcctgaagtgtttcctagatctggggccaggagcaaaaacctcctggcaaaggaggagaggaggttgtgcgggacaaccttctcctgacagaaggtgccaggctgggggtggcagggctggatagggaggggcactgcccaagactgggatggctccagggagctggccctggtgatgggtgcttgcaggtaaccagaggtcaagttggctggtggttctagatgaggctgtctggtttctggtctctagtttccttgatctctaattttgtgtcacttctcctctcccctctcccttggcctcttcccctgagattccctgaatctccctccatgctcttaaccatgtttacccatcattggtcctggagctccccagcccctttcctaggcctcaggacctcaccctccatcccgtctgccctgcaggatgtcgctgctgagcctgtcttggctgggcctcaggccggtggcagcatccccgtggctgctcctgctggtggtcggggcctcctggctcctggcccgcatcctggcctggacctatgccttctatcacaacggccgccgcctccggtgtttcccgcagccccggaaacagaactggttcttgggtcacctgggcctggtgagtggcaggaggatggatctagtgtctcagggtggaagggtggaaatggggctcaggctgagggggtgggctcgggtctgggacggcagagaaactcactcattcctctgatcactcactcattcctcttcccactcattcctctcctcactcactcattcctctcctcactcactcattctcctcactcactcattcctctcctcactcactcattcctctgcgcactcactcattcctctcctcactcactcattcctctcctcattcactcattctcctcactcattcctctcctcactcactcattcctctcctcactcactcattctcctcactcactcattcctcttcccactcactcattcctctcctcactcactcattcctctcctcactcactcattcctctcctcacccactcattcctctcctcgctcactcattcctctcctcgctcactcattcctctcctcgctcactcattcctctccttgctcactcattcctctgctttgccatgccaagcctttctcatctccttgtctaggggaagtcacccctagactgttttgaattcttttcctgactgttttcagtacactagtgaacctctgatgggttcctgtggcagagtgggggttacgcagcaggtattcaccattatttccacattatccactgctgtactggaggcctcttgggctcactgtctagaacccactttctgcctggcccatttgcttgtgtccatccatctctgggctggagttttcccataggaagtagctatacaccccctaccctcacatcatgacacagctgggccagaagagagatgtgtgccatctccaccctcccccgtgcaggggcatcttctttatccccactaagctgtcccaatgagttgtgttgcccaacctggataaaaattggccagtgacttcctctttaaagttacctttgacccttcagaccctgccctttcacttagacctgctgtcccctttgggcgatttggcatcagtctgttctttggcaaatggcaggaatgatgggtgtgtccacaggtgcagggtgagggaacacaggacggactagctctgagcttgatgtgcaaaaggtgctccctggtgagagccgctgttcttcctgacagacagttagagccacctcttctcccctgggggctgctgagaaaggaagttccaccgtgtacagaccttctccatgggagggcctggggcccctgaggcccagccaggacataaaaggatgtggggaccagccctggggacatgtcctgaggccacattgctgcccacacaccacacttgtggagcccaccccacgtgactttccgtgggctggagccactcccaggatgagaaaatccatcctctttattcaaggtgggcttctccatgaacagacagtttgtcttccccctgttccctgggatgtagccttggaagttagatactgcccccaagagaagggagcaggagggagtggagattacccctatgtgcgcagaatctggacatgctgttcattgcagaggctgtgccacctctaaagcctgcagtgggacctgctgtggctcctcctgggaaatgtatttatttctccagagtaatagaattaataggatatcaatatctacatctatctatctatctatctatctatctatctatctatctatctatctatcagtccgtctgtctgtctatgatctatctaatctatggagagacagaagagggcatttattataggaattgactcatgtttatggaagctgaaaagtcccactctatgccttctgcaagctggagaatcagggacactggtggtgcaattccgtctgggtccaaagccctgggaacctggagttctaatgttcaagggcaggagaagatggatgtctcagctgcagaggagaaaacaaattcacccttcctccacttttacattctacgtggaccctcaacagattggatgatgcccacacagactgggaaggggagatcctccttcctcagttttccttcaaatgctaatctctcctgaaacactctcacagacatacccagaaataatgtttgactggatatctgggcatcccttaacccagtcaagtggacacaggaggtgatggcccttgccttgcttgcaggtcactcccacagaggagggcttgagggtcctgacccagctggtggccacctacccccagggctttgtgaggtggttgggccccatcactcccatcatcaacttgtgccaccctgacatcgtccgatctgtcatcaatacctcaggtactcctgcagagcttgtggtggtgggcacaggagaacattggagggcttctagatctcatccccaaagcttctgtgcagctcttgtagtactcagccccttccttcctgcttctctctcagccaccttcctctttccttcctgtagtcaccaaccccaacctcagtgtcttttctctctgctgccatcttccccacctccgtgttgttctgggaaccactggggccccgagaagccttaatccaaggccctgtcctggaggaatccccaaacttgaagagatggagcagtacagagacatccccaacttcatggggttcagaatgggccaggaggagataggctgtgacagagcataggagaacaaggtttctactggggcaggctggaaggcttcctggaggaggcgtagcaggagctgggtgtggaacgatgagtgataattttttttttaaagcaggggcagggtgatgcagtgggcattgttagtattcaaggctccgggccaggcttggcattggccttgtccttctgcaggcccagagcaaggacaagaagatgagaaggagttgtggttggtggaagatctaggctgctatttccatgacattcacctcttgtgggtcgattccttctaatcccatcctgtggcacttccaccatatgttcattgccctcttgctccaggccccaggaatctccaataggagacaccaccccagcctggagccgtacccttgccctctgcccttcccatctttggacaggccagggagagcagcagaaggggtatcacgccacagagaccatggctcaagccccaaaatgctgagtgactctgggcaggtccacggctctctatgggtgctgaggtgtctttccattgtgagtggtagaaactcaaccccacgcagtctaagccattaaagagaagctattgactgcaacatccagggaggttggccttcaggcacaactggatccaggtctcacctaatatcatcagaattctgtctttaactcttattctgtaaatgtgttttgtagagtgttgacttatgcttgggtgttgcagaacatgttggaccatgtaggagccatgtcaagacatgctgggtgtgctgtaccatgtcagggtgtatcattgctctatagtgttgttgcagcctagtccggtcccctttatgccccccaccctcctttcttcttctgcccatggcctccttcctgctatgctgggcttggagaaaagacgtccaaacctctggctgggagccaccctccatacccaaagtccctcctctattcctctccatggaccctgatggtcctcattcatgtcagatgccattacagacaaggacatagtcttctacaagaccctgaagccctggctgggtaagtaactgtaggtggacgggacggggaccaacttttgtggccaggggaagattctgcccttgcccacagcctttggctgccgtactaggggatgggctcttgttaagtgttggtgacaagtggagacaccaccgtcgcttgctgacgcctgccttccatttcaacatcctgaagccctatataaagattttcagcaagagtgcaaacatcatgcatgtgagtgccttgaactcagcatcccagctgcagccttggggtggagggatcacatacaattgggtctggaatgttggctctcctgggtgggtttggggccattgctcttcctctctgtgccttgatttccccatgaggctaataatcctcactaaaaggtggtaggagcatgtaatggactcatgtctctgacacttagtaggtggtcagaaggagtcaatttccacatttttctcacagaagccctgtaaactcaagaaaggaatgatgacacgtgcatagtagtcattgctgagtacagatcacttcaaaactaattggtttagagcaataagggtttatatttgctaacaaatctgtgggactgttggccagcccttctgcatgtggataggatccctcatggtataagagcagctgtgggtcaggtaggcagctttgcttgtgccagctcagttctctcacatatttggagctttgctggcttctggctgatttaggatggcctcagctgggacacctggacttttctccatgtgattctctgcctctagatgacaccccaggattgctcacatggcagagacaggattccaaggcagtgagaggaggatacaatgcttctcactagttattattatttattttatttttgagatgaagtctcgctttgtctcccaggctggagtgcagtggtgcgatcttggctctctgcaacccccgcctcaagcaattctcctgtcttagcctcgtgggtagatggaattacaggcgcccaccaccatgcccaactaattttttgtatcttcagtagagacagggtttcaccatgttgggcaggctggtcttgaactcctgacgtcaagtgatctgccctcctcggcctcacaaaatgctggaattacaggcatgggctgctgcacccagtcaacttctcactagttatggccttatcattttcaccacattctattggccaaaaaaagtaaaacgtccaccatgaatcaatgtggggcaaaataggctccatctcttaatggaagttgctaaaaaatcacattgcaaaagatgtggatgcagggagaagagaagaaatggagccaagcgttttgtgaaacgactaggatttttttttctcctgtgagctaataaattagcttgttacttttgcatggattctgccagaagacacgagacttctgggtcaaagacaaaagtttattactcatgtctcagcaagtggcatgtgcatcttgttggtttggatcctttctctaagccacccaaattccctggggtgataaggtgggcttctatagatgcctgccatgtagtatatttgcatgatggggaggagcattaggcttagagaatcagcttttagagcaagcagaataagcctaacgtgtgtcccagaggagccattaccttataccccaaggctgttctctgcaaacacaatgctgagaaatagcccagattaagaacctcagggttgaccgggtgtggtggctcatgcttgtaatcccagcacattggtatcacttgaggtcaggagttcgagaccagcctggccaacatggcaaaaccctgtctctactaaaaatacaaaaattagcagggcgtggtggtgcgtgcctgtaaccccagctactcaggaggctgagacaggagaattgcttgaacccagcaggcagaggttgcagtgagccaagactgtgccactgcactccagcctgggcaacagaacgagactccatctcaaaaactagcaaacaaacaaaacaaacaaacaacaacaacaacaaaacttcagagttttgcattcttggcatgctcagaaaaaaatgttcagggggatcacagggactttttgtaatcaatttataacaatgaagatgaatcaagataatatttattgagaactcatcatatgacagaaatgatgtaatatgcctattccatggtgtatgtggtctcatttaatttacaccgccttgtgaagtagaggatattttccaccctctcccccatgccatgacaaatggtgaaactgagggccagagaggttagagagatttcccaagttcacccagcttgtcagtgagtctaagagtgggggaaaaggggttctagcctggctccctggcatcaaagcaggtcatcttgattgctattgaggatttgacaggtgagacctagaggagggctgtgagttgaccaagggtacacacagcttaggaatcacagctggggcttgaacccagccatgggatcttcatctcctaatagtaacagcttccactctcacccaagcgtagtcctccctgaggatgggggtctgggacagaaaaccaggagcatgcctctgggggagtccatcctggtggttggggttgcagggggactcagaggagccaaggcctggccccagccctgctcccttctctggccaggccaagtggcaacgcctggccatggagggcagcacctgtctggatgtgtttgagcacatcagccttatgaccctggacagtctgcagaaatgcatcttcagctttgacagcaattgtcaggagtgagttcttgcccagggcctgggaacatgggatggagtgggggtgtgggtgtggggagagcaaagcccagggagacaagaagagccttcctggagagatgatgagaactaggcattgaaggacaaagaaggagagaaggagagagagagagagcgagagaaagagaagtttcctccaaacaagtggaactgtttgggtcaaggcaaggaggctaagatgaacagagcatgtgcaacaggcagttgggagacacttggaaatgaaggtggaggggttggcagttaactagatcttaaggatcttgaaaagtcagacaaagggagatgcattttatccaaggttcctaaggagccatggaggtgtttgagcagatgagagacatggtcagtactgagcttggacactggactctatgggactctatggaagattgactgtcatgtagacacagcatgcaaggatgccagggagaggaggtctgagtttggtggagaaaatggggcagatttgggagaaactgagtaataataggcaggagcagatgttttataagacagagagaggagatgcccatgatggccaagctgtgccctggggacctggggcaggaggcagctcacagagagtgggaggcagagagtgaagtgcgcttgcaggacacccctttctgcatggaatgtggtcctgggattctggctggaaggtgctcccaggctttcatgtgggtaaggagctgcttcctctctctggactggccctgcaggaagcccagtgaatatattactgcgatcatggagctcagtgcccttgtagtgaaacggaataaccagttcttccggtacaaggacttcctgtacttcctcactccctgtggacggcgcttccacagggcctgcagactggtgcacgacttcacagatgccgtcatccaggagcggcgccgcaccctcactagccagggtgttgatgacttcctccaagccaaggccaagtccaagactttggactttattgatgtgctcctgctgagcgaggtgggcctctctgggatctgaattcaagaggtaaaatggagcttcaggtcaaatgtcagattgaaggaccggacttgatacagagggcactaaggagccatggaaggtgctcgaagaagggagggacaagtcagataaattttagaggtgattgcatagaaagcttcctgggaagaacaaacaggaggtcggaaggaagcatgtgggggtagatctggaggtgacaagggagggatccttctgggataatgggtcttcagagactgtttcagtttagactccagtgaccccagaactagtgtgattggggttcttgtctccaggataaaaatggtaaagagttgtcagatgaggacataagagcagaagctgacactttcatgtttggaggtgagtgtcccagtctggggctacagtggggacaggggtctctccactccagggaagtggagggccggccctgaatcacttcattctgcccaacctccccctcccctcaaccttcctgagagcctcaatgtatgggcgctgtccaccctctgggtgctgaagcagcccagagactcaagcctgcctggctgaccctcaggccatgacaccacggccagtggcctctcctgggtcttgtacaacctcgcgaggcacccagaataccaagaacgctgccggcaggaggtgcaagagcttctgaaggaccgtgagcctaaagagattgaatggtgagtgcaggtgctggtggctctgcctttctgcctttctgagtccttctcgttggttcttctccccaggtgggggaaaaggggaggatctttttgatgattctgccattgttgcctagtgggaataggagtagagcccagaaacaggctagcaagggtaacattgcatgctttggggacagaatggtctgggagtccatatttatttccccactaacttgctatgcaagcttagtaaaatcaattcccttttctgaacaacttttctcctttgtaaattgggggtgtggggaattgctgtcccacagggctgcttggagaattaacggcaaataccgcaatgacttttggaccaatctaatattatgatttatcaaaacattctcttatcaacgcgtgtttttatactttccagccttttggtataaaagacatgatgtgttgaatatcggtgtacgatgatcattgctgacatgtcatctttgtagagcagattcctagaagtgcaactgctgagccaaagaccatttgagttttacaattcaatagctcttgggaaatctactgctatacacagattttgagaataccaaatttcctcataacctccccagaagtgcctattatgaaactaaaacatttgccaatctgatagatgcaatataatattttgttattttaatgaacataactttaaatgtgggtaaagttgagcactgttttcacctgccgatgagccatccatatctatttttctgtgaagtcagtttttgcgtaatttgttttttctactttgggtcgtactagttttcttatttacttataaaaactctttacatattaagaaaattatttcttttttctgttatgcaaaatgttgcctcgcattgtcttggactttatttttatttttggttcatttatttgtcaccaaatttattaattttttcttttataattcctgtttgtgtttcttaaaaaaatatttaaaaaccattttatactctaatagtaaaatgcaaaactcttgtttgacttattttaataggcttatatatttttaaaagtttaacattttatcaatatttttcacatttagaaatttttccctttgaaatctatgttggaatctattttttctccaaatgtctaattgtcccaaccaagtttaatgaatattttgtccttgtgtcatgattctaaataacaacaaattcacaagaaactatgtgtgtgtatatatatatatatagtgtatatatatagtgtatatatatatagtgtttgtgtatatatatatacacacacacatactatatatagtgtatacactatatatatatgtattttaaggcaacaaataaaaccatatatatatatgcctatcttaggcatgtatgtatatatatggttttatttgttgccttcattttgttccatttattatgtagtcctacatgagcagcatgaagtctacttttaaaaacactttaatatttggtagagtttgttctgtctcattactttgtgtttacagttttttttccctcgagttcctatttttttccatttgaactctgtgatcaggttagccagtttgacaaatacttttgaaaatgttaattaataaattttttggaccttaggtgctaatgtttgagttaacgatgctcttcaattcatggcaaattctcgtcatttttctatacaatacgtatttcttcccatttatctcaaatctctccttccagctctccatcagtatgattacaaaatggtggatacttttatctgtaaaacttgttgttggggtggatacattttaaaattctatatatgtttttatttcacagatgttgtgctggttcttaccttttcagaaatatagcactatgatttgtgctacgtttgcagcaccgtggttgcatgctatgatttgtgctatataaatgtagcactatgatttgcagcaccgtggttctaagtacatttattctcttgcttttagctatgatctagtccttttctcttcagttctgtagtggatacctggactgcttctatctctccagtgcaatgaccatctttgtgcatatctctttatctgcatgtctgataatttctctgggatctacagttgggaaccagcttgctgggctgtaaaacacacatctttccttggccatgtcctggaggttgccttccatattggcagcttctgtgcaccccactgtcagtgcatgtgacccctctacccacacctcagccaacccttggcaacacctacctttggccattctagcctcgaatagatgtgaagtggtacctcgttgtcagctagcttccatttctatgacagctagtgactttgcgcatctcctcttacatttctcatgtttgagcatccatgaattcttagatcaaatcctttgtctacttttcacttgggttacctgttcgttctcttgtagatttgcaggaattcctaacatattcagatattgttctggatatctatctatctatctatctatctatctatctatctatcttaggcatcttctctgaatctcttatctctcattggaatgttaattgggtccactgtatcttttactgcacagaaatccttaatttgcatgcgtatttatcctttatattttatcttgtttaagcttttggggttttaagaattcctactcttaagtcacaaaaatttctcctatgttatcatcttttaacattataattttacctttctcataaaggaaaagactccaccttgtatatgcagtagacaagaacctgtttctctctgttcccacatttccagtggtctgaacaacttccaccacactatccattctccaggggcgtgtggaccttcctttagcagatgttaagtttccccctattcacaggcctgattctgagctctctactctgttctatggatctgtttttctgttcttgcagcagtcccacagtttttttaaaattattttatttttattagtatgcatttgtaatatctcttaatatctggaagcttgggttctccttcttcaatcttttatttaaaaattgacctagcttggatagggcatggtggcttatgcctgtaatcccagcactttgggaggctgaggcaggcagatcacttgaggtcaggagtttgagaccagcctggccaacatggtgaaaccccatctatactaaaaatacaaaaattagttgggtgtggtggtgcacacctgtaatcccagctacttgggaggctgaggcacaagaatcgcttgaacgcaggaagtggaggttgcagtgagctgagatcaggccactgcactccagcctgggtgacagagtgagaatccatctcaaaaaaaaaaaaaaaattgacctagcccttgatgaactttaaaattccttcaattagaataagatttcaaagttccaaaaagaatccagctagatttttattaattgcatgaagtatattgattagtttagaaataattgacacctttacaacatatggtcatcccaccctacagtgtggagtggagattatttattcaaataactttataagccctttgtagagatgtttttttcctgcttttgttacctctttatataattttaaatactttttcacacaaacaaatgaacacttttgtttttgagatggagttgctctgcctcccaaactggagtgcggtggagtgatctcggctcactgcaacctctgcctctcaggttcgagggattctcctgcctcagcctcctgagtagctgggactacaggtgcccaccaccatgcgtggctaatttttgtgtttttagtagagatgggatttcaccatgttggtcaggctggtgtggaactcctgacctcaagtgatcctcctgcctcaggcttccaaagtgctgggattacaggagtgagccactgcaccccgccggaatgaatacttttaagagacaccctctgaatattgttttgctcagaaatacctctaaaaacaccaggtcaacttttcttctagtagttttgtgactttggttttctaatgcttacatctttgttgcttctggaattaattttgttataggactgagggtcagagggaggtggtgagagggtctccaggggcagcaggagggccgtgtatgctctctggataattgttgggtgtttccttagggacgacctggcccagttgcccttcctgaccatgtgcctgaaggagagcctgcggttgcatcccccaatccctacattcgcccgcggctgcacccaggacgtggtgctcccagacagccgagtcatccccaaaggtgccctccatggcaggggaggagggtcctgggcagggcggtggtcccagcaggcagctcggaccttgttcttactgtcctctcctgcacgacagggaatgtctgtaacatcaacatcttcgcaatccatcacaacccctcagtctggccagaccctgaggtgctgcccctccctgtttctccatcccccgggcctggtcgggggaggggtcttgtcccggaaaaccagatactccctctctactccacccacatctgttttatgtgggggtggctgggtgtcctgagaggccccatcagcagccttaacttgcctccaccccaggtctatgaccccttccgcttcgacccagaaaacgcccagaagaggtcacctatggcttttattcctttctcggcggggcccaggtgaggccagggggtgtctgaggtgggcatgggctgagggtggcacagatggctgccttgtcagatgcctgacttgtaggaccacgtgtttctgtgataggggttttaaagaagatcctaggaaaaagggtgtgctcagagcctcctgccccgtctggtttcagttggggctggggtctgggctaggctctgggaatatgcaagcccacatgggggtcccagacccagcttcccccctgtctgcccaaggtgatctgggtggggttgggggttccgggcctggttcctggcgcagtggggccgggatctgggtcctgggtgcagtcagaccttccaccttggcccccaggaactgcatcgggcagaagttcgcgatggcagagatgaaggtggtcctggcgctcacgctgctgcgcttccgcatcctgcccgaccacagggagccacgcaggacgccggagattgttttgcgtgcggaggacggactttggctgcgagtagaacccctgggctgaggcctgcagtgacccacccacctacctttgcatcacctacctttgcaccaactaccttttcagatttccggtaataaatctgtgttggcccctgtgcctcagtcccgcggatggccagtagggggcgctggaggactgcggggatctagggcctggctgggaagaggcggggagatgtctctgtgcccaagatactcactgcctctctgggtgagcacaggagccccgtgctgagggtgggatctcccagagtctaagtaaagactttttcccccccaaaataattgtgtattctgatataaatttttgccaatttagaatccctgttttttagctaggtgcatagcagcctgaaatacagatcacatttgaaagcctttcttgaagctcaattggttaagtgactgtggctgtcccatgtgtagaagccaaagattatgtggtaattctggtaacctttcttaagagaaagctgctacagtctgtctgctcagtcctcccctcttccttcctgctgcttggaagatttttttttttttttgagacatggtgtctctcgtcgcccaggccggagtgcagtggctcactgcaacctccacctcctgggttcaagtgattctcctgactcagtcgcctgagtagataggataacaggcgcctaccaccacacccggctaattgtatttttagtacagatggggttttgctatgttggccaggctggtctcaaactcctggcctcaagtgatcagcccacctcagcctcccaaagtgccagaattgcaggtgtgagaataaaaattcttgagtttcaatgtttattttagaatcaggtgctaacatgcaaatttattacaaaggtatattgcatcatgctgaggtttggagtatgaatgactccatcacccatgtagtgagcatagtatctaataggcagtttttcagcttttccccctccctgcttcccctgtctagtagtccccaggatctgttgttcccatctttattaccatgtgtatccaatgcatacctcccacttataagtgagaacatgcaatattttgttttctgttcctgcattagtttgcttaggataatggcccccagctgcatctatgttgctgcaaacgacatgattttgtactttttaatgactgcatagtatttcatggtgtatttctacacattttctttatccactccaccattgatgggcacctgtgttgattcagcatcttcgctattgtgattagagctgcgataaacatgtggatgcttgtgtctttttggcagaatgatttattttcttttgggtgtatacccagtcgtgggattgctaggtcaaatggtagttcaactctcaattctctgagaaatatcctaactgctctccacactccattagtttagtggctgaactaatttatatttccaccaacagtgtataaatgttcctttttctccatagccttggcaacatctgctattttttgactttttaacaaattgcttgcaagattgatgtggcctctggagctccatcttggctcatgaggacagggactgctatttagggcagatggggcagatggctagaagcagtcagggtctatgaccctagatccatgctgtgacctgaatgtttatgtagcccccaaatccatacattgaagcctagtctgcatatggtggtattaagaggggaggcctttgggaggtgattaagttgtgagggctctgccttcgtaagtgagattaccccttataacagagacctgagggagcttgtttgccccttccaccatgtaaagacacgtgcaaggtgccatctatgaggaacaggcccttagttgacactgaacctgcaggcaccttgatcttggacttcccagcctccaaaattgtaagcaataaatacctgttgtttataaactacctagtgtaagttatgttgtcatagcagcctgaatgggctaagataatccatatccccttggaattgtactaaacatcaccttgaagttgtattataaatgtcagaatcccagtctgctattcactagctgattggcttggggaaaacttgtttatctctgtagccctggttttgtttaccacttaatagtattcacctcattgggctgctggaagactgaacaagccagtatctacaacatccctgagccacatctgttgggtattagcggtccatgagggttaattgcctctctttctcttctttttgcatcacatttgaagttttgacattttaaaaaatcgcaagaggttgcttcaagctttgggatgcatggcaaccttctcttgaggaaaattcattcgaatgttttgtgtgctcaaaatatccgttattacatccgagaatctacagtggactttggtgaaaggttggcccaaagcttagaacggaaaaaattaatttttccagagaggcacgactcagaatttattcctgtctaaaaagttcaggtcatgaaggttttcaagtgagaggaaggtagagggtgtgggctgggcggggggcgggcggggggggggaggggccgcccctttcagcaccagggacagcggctgcacctggactttcccctgtctgactgtagggggctcctgcggggcgcagagtccaaggactgagcgcttttcaggggcccatagattgggaacctggaaggattattggctgcaaaataagaatggaacattgcaaaacgaaataaataactatttaatatattctatgctgaaagtcaatttttcttccctttaaagtttaagtttcataaataatgcatgcttatagaagaaattgcaagaaataaaaatcatccataatttcaaaatgtcagaataatcactgtttatattttcttgcatatgcttccagtttttaattcatatgtgatctttttacatatgaaaatgtttatttacatctatatagctgtgtcatatcacatttgcatgtaattttgtttacaagtgctattttcctgccaaatgagcacatgaaaagatgctaaacattattcccattatgcaaaccaaaagcacaacgtgatgtcacctcaacacctacaggatggctagcatctaaaaaagggaatataacaaatgttggagaggatatggagtaatcgaagccctcatccattcctggtgtgactgtaaaaatggtgcagctgctgtggaaaacagtctggagattctgaaaaactaaaacatagaattactatatgatgcaattccacgatatcatattaagctcctagctatatactcaaaagaatagaaaacagttgttcaaacaaaaaagcttgtacattcgtgcttatagcagccctattcacaattgccaaaaggtagaaagaactcaaatatccattaacagatggatggataaagaaaatgtgatctattcgtataatgaaatattactcagccattaaaaggaatgaagtactgatacatactaccacctggatgaaccttgaatacattatagtatgtgaaagaagtcagacacaaaaggtcacatagtgtatgatttatttataagaaatgtccatctgggtgtggtggctcatgcctgtaatcccagcactttgggaggcccaggcaggcagatcacttgaggtcaggagttcaagagcagcctggccaacagggtgaaaccccgtcgctactaaaaatacaagaaaaattagctgggcgtcatgggatatgcctgtaatccaagttacttgggaggctgaggcaggagaatcacttgaacccaggaagtggaggttgtggtgagctgagatcatgccatcacgccactgcactccagtctgggcaacagagtgagactctgtctcaaaaaaaaaaatgtccagaataggcaaatctatagagacagaaaggagattggtggtgtcaggagctgtggggaagtgggaagaggaagtgctaatggggtcaggatttcctgctgggtggtgaagatgttctggacctagatagtggtgaagtttccacaacactgtgcatataccaaatgctactaaattgtaccctttaaaatggtgaattttatgttttgtgaattttacccaaacaaaaaatgctattttatctcaaatttttgttaatttgggctactcacacgatatgctgttaacatctttccatgacatcaaatcattttatgaaacattattttgtggttttaacaaatatttgggttatgtattcaaaccactctatttcttaaaaatggcgtgatgttacaaaatgatataaaagtgctttgtctcacgttgcaagaattgtcttcatacaagttgacagtttgaggtatcattggttacaaattgagtaacttcatcaaataagttttggggtaaagatttcattttcaaagcaatagataacaactattttttgtctttctactcaatatatgggtagtttacataccgcagttacagtgttatagtattgtgtttgtctatgtacttacagtgagttttgtaccttcagatgatttcttattgctcattaacatcttcttctttcagtgaggaactccctttagcatttcttttaagacaggtctgcagatcccttaggttttgtgtgtctgggaaaatctttatttctccttcatgtttgaagaatatttttgctggatatactattctaggataaaagttcttcccttcagcactttaaatatgtcatgccactctctcagcatatgaggtttccactgagaagtcttctgccagacatattggagctcctttgtatgttatttgtttcttttctcctgttgcttttaggatcctttatccttggcctttgggagtttaattattaatctttttttttttttgacaggatctggctctgttactcaggctgtagtgcagaggcatgatctcagctcactgcaacctctgccccctgggcttaagccgtccttcaacctcagtctcccaagtagctgggactacagatgcataccaccatgcccggctaatatatatatatggtagatacagggttttgccatgttgcccaggctagtctcaaactcctgggctcaagcaatccacctgcctcggcaacctaaagtgctgagattacaggtgtgagccgccctgctcagcctaactattaaatgttttgagttagtcttatttggattaaatctgcctgcttttctgtaaccttcttgtacttgaatgttgatatctttctctaggtttgggaagttctgttattatcctgatctctctccacctcctctttaaggccaagaattgttaaatttgcccttttgaggctattttctagatcctgtaggcctacttcattttaaaattcttctttcttttatcttctctaactgtgaattttcaaatagtctgtcttcaagatcactaattctttgttttgcttgatcagttccgctgttgagggactctgatgcattcttcagtatgtcaaatggatttttcagctccaggatttctttggttcttttaaattatttcaatcttggttcttcttaattatttcgatctctttgttaaatttacctgataggattctgaattccttctttgtgttgtcttgaattttactgagcattctcaaaacagctattttgaattatctgcctgaaaggtcacatatctttgtcactctggaattgatcactggtgttgtatttagctcatgtggtgaagtcatgttttcctggatggtcttgatgcttgtgaatgtttgttgatgtctgggcattgaagagttaggcatttactgtagtctttgtggtctgggcttgttcgtacctgtccttcttgggaaagctttccaaatattcaaagggaattgagtgcagtaatctaagtctttgataaccacagctgtatctacacagggagcacctcaatcccagtaatgctgggactcttgcagattagtagaagtactgccttggttgtcttgggtaagatctgggaaaattccctggattcccaggcagagactcttctcttcccttactttcccccaaacaaatgtgtctctctctcgatctgtgctgatctgtctggagctaggggagggttgacacaaacacccctgtggcatctaccactgggactgtgctgagtcagacctgaggccaccacagcactgggtcttgcccaaggcacacagtgaccactgcttggctaccacctgtgttgactcaaggcccaagggctgcataatcagcatgtggtaaatctagccaggccttgtgaccttcccttcagtgcagtgagttccccacatatctggtgggtccagagatactgtccaggagctgtggcctggaatcagggactccaggtgctccatcccactgtggctaagctggtacccaagctgcaagacaaggtcccctttactcttacctctcctttcctcaagcagaaggagcttctccccgtggccactacggctgggaatgtgctgggtcacacctgaagcccgtatggcactgagtctcacccaaggcctgcaacaagtacaacccagctaccactgatgattattcagggcctatgtcctctttaatctgcaggtggtaaatcctgccaggactgggtccttcccttcaaggcagcatgtttcctttgtccaagagtgtgtttagaaatgttgtctgggagctagagcgtggaatgggagcctcaggatgctgtctggtgccctattcttctgtggctgagctggtatccaagctgcctctcctcaagcagaaggaagaagtctctcctggagcagcaagctgtgctgcctggagttgtgggagggatgatgcttgccaagactcccttggctgccctggctggtgcctcactaggttgtgtgcaccccaagttctctggctctgagcccagcgcagcaccaggacttgctccagaattgcagtccttgtagctggatttaccacatactgattgtagagcccttgggcctttaacaaacataggtggtagcctttcaagtttatttaggaccctggagcactttagcctgcaatggtggtactagctggaactcaggttctgaccactgggatggacaattcccttctgactagggctggcctaaatgcttcctctgtcggcactggctaaattctaccccatgttgctttctgctgtgacagggcagcactgagtttcaatgcaaagtcccatgatcactgtgctctctcccctccactcaagcacccagattctctctccagccatgaggccacttctgggagatggggaagtgttagtgtaggcaatttaagactcttttggccaggcacagtgggttactcctgtaatcccagaactttgggaggccgaggcaggcagatcacctgaggtcaagagttcaaggtcagcctggccaacgtggtgaaaccctgtctctactaaaaatacaaaaattagctgggcgtggtggcatgagcctgtagtcccagctacttgcgaggctgaggcttgagaattgcttgaacccgggaggcagaggttgcagtgagctatcgtgccattgcactccagcctgggtgacagagcaagattctgtctcaaaaaaaaaaaaaaaaagaaaaaaaagaaaaagaaaaaagaaaaaagaaaaaaaacctgtcttttgtacattctttagtgcctctttaaatttttaatttttgtgggtacatactaggtatatatgtttatgaggtacatgagatattttgatacaggcatgcaatgcacagtaatcaaatcatggagaatagattatccatcccctcaagcatttatcctttgtgttacaaacaatccagttacattcttttcattattttaaaatgtacgattaagttattattgactatagtcaccctgttgtactatcaaatagtaggtcttattataggtctaattaattctttctatctttatttgtacccattaaccatccctaacttcccctcactcctccactccccttcccagcctctggtaaccatccttctactctctatctccatgagttcaaagtacctctttttttgatatgatgttaaaaccagataccatgatcactcacctaatttttggttcttatgaaggtattttcttgtgtggatatttgttgtatttggcgttcctgtggaggagacgatcaatgacgcattttattctgccatcttgctctacctcctcctttttgtgattcagatgagactccttgacagctggtggctaaattttcaaatgcaatatttttggcagaaaatatattcactcatgtaaaaaataaaatgcacagtgaaaaatgtttcttgtacctatgcccttcatttatccagtctcgccgtctttacaaaggtaaacacttttactttttctgtatcctttcatagtatatttaggcaaataatacatgtaattaatctcctttgttcaggatgatgaattgccccccccccccacgatggtcagttcacctccctggggcacaactgtaaaaccctcacagctctagctgtattcagggtcaactccaccagccatttcatccaccatatgactcctacagatgagatacgtaaggtgcagacaggttgagagatttgcccaaggtcacacagccaggaaatagcagaactgtatccaaacctaggcctggtgaacatccacaataccgcatgcctcctgcatggtctcaaactccttctccttgtccttgcctgtggacagccccactcatcttaaaattacatttacggccaggcacagtggctcatgcctataatccaagcactttgggagtccgaggcaggaggataacctgaggttgggagttggagaccagcctgaccaaaatggagaaaccttgtctctactaaaaatacaaaattatctgggcatggtgctgcatgcctataatcccagttgcttgggaggctgaggcaggagaatcggaggcggaggttgctgtgagccaagatagggccattgcactccagcctgggcaacaagagtgagactccgtctcaaaaaaaaaaaaaaaaaaaccaaaaccaaaaaaaagcaaaaaaccaaaaaaacatttactcagtaggcactctttttttttttttgatgatgagtatcgctctgtctcctaggctgaagtgcagtggcatgatctcagctcactgcaacctctgcctcctgggttcaagcaattctcctgcctcagcctcctgagtagctgggattgcaggcacacaccaccatgcccagctaattttttgtaattttagtagaagcagggtttcaccatgttggtcaggctggtctcgaactgctgacctcgtgatctgcccgcctcggcctcccaaagtgctgggattgcaggtgtaagccactgtgcctggcccagtaggcactctttaagagcaggtgtcacacagtagaaactctatgtagaccatatgtagaccatgagtcacagagtgggcacactatgaagagcaggtggcagcagtaggcactctttatgtagagcaggcagcagtgagtaggcactctttatcaggagcagatgatactcagtaaacactctttatatagagcaggtggcatctgtaggcactctttatctagagcaagtggcattcaatgggctctctctcttttttatttttttgtgagacagagtctcactctgttgcccaggctggagtgcagtggtatgaactcagctcactgcaaactctgcctcccgggttcatgagattctcctgcctcagcctcccgagtagctgggatcataggtgcccgccaccacgcccggctaatttttgtatttttagtagagatggggtttcaccatgttggccaggctggtcttgaactcccgacctcagatgatctgcctgccttggcctcccaaagtgcttggattacaggcatgagctactgtgcctggccagtaggcactctttatgtattgcaggtggtactgagtaggcactttttatgtagcgcaggcaagagtaggaactcttcatgtagagcaagcagcactcagtaggcaccctttatgtacagaaggcagcccacagtaggtacactttatggagcacaggcaacactcgagcaggcagcactcaatagaccctctttatgtagatcaggaaacactcagtaggaagtcaccatatagagcaggtggtatcagtaggcactgtttatgtagagcacttggcactcagtaggcatgtgttatgtagacagcaactggtgctcagtgggcactcttcatatacagggggtggcactcaataggcactcactatgtagagcaggtggcacacagtaggcactctatgaggaatatcaggaactgagtatacagggttaatgtagagcacctggcacacagtaggcacactttatggaaagcacttggcacagagtagacaggatttagcacctggcacacagtagctgcccttcatttagagtattggcacacagtagaagtactttccatgcagcctttgtgcagagtagagactggcacacagcagctcaagtgctagttgccaccctttcccttcactcctttttggggctccctcctcttaggagccctcattgtcccccgctaaggccctcatcgaacatcccatttcccagatgggaagactgcacccaggaggggcagtactgaccaaagtcagagcaaggatgaggcagaatgaggactccattcatggttccctggctctgcccttcccctgcctggaccccatccgttccctctcatcctaaccctccacgtccccgctctgtcctcctatactgagtccggcctccagatttgcttttccagctgagctcttaatctccagaatctgacccaggtaatcctcagtggggctggattctttgttcccgttcctagcagtcaggtctccaacagggccctggactgcctggaggcaagacttgaactccatccagcagcagggggatagaggcttgtctcttccaggttgcctgattcagcatccagaagtggtacacggtgtcctaccggcccagggttagagaggagcacaggagatgatctggaacaaggcttggcctggcctggctcgcttgacacctgaactctcaagttcatgcttttatctgccacacactcagtaggtgctctttaagagcaggtgtcacacagtggaaactctatctgacccctctcggcttactctccaccttatgtgggaggtgctgagacctgaggatccagtgcctgtgctgtgtcaccctgagctggttcctctgcatccagctggtctcccacacccaggttttggccagctgcccagacatgggagcggcacccaggctgtggggattggctggcccagcccagcccagcctagcctcccacagccttccctacatcaggggccaggggaaaaaacctcccagaagaaggggagaggaggttgtgtgggacaaggtgctcctgacagaaggtgccagggtgggggtggtgggcctggggcatcctagcctgtgatggagatgggcactgggcaagggattgggcgcacacataggggagccccagccttcccacattctccattgctgcccaaggcccaggcagctcctggttgctggcttggaggatgagtggttttctaactgaaaccaagcccctggcaacgtcctaatgattcaggctgggcctttctggactttaatcagtttctctgtctttctcaatctaagtgcttaccgggtaactggaggccacttggttgctggttttggctgggcctttctggactttacccctcagcccctgtttatccatccctgtttactcttactgttctatctccagcactgcccgtctctgcctctctccactgtccctggagctccctgggcccttccctgggcctcaggacctcactcaccaccccatctgccctgcaggatgccacagctgagcctgtcctcgctgggcctttggccaatggcagcatccccgtggctgctcctgctgctggttggggcctcctggctcctggcccgcatcctggcctggacctataccttctatgacaactgctgccgcctccggtgtttcccgcaacccccgaaacggaattggttcttgggtcacctgggcctggtgagtgtggcagcaggacgggtctggggtctcagggtggatggacttcctgaggggtaagaatgaggctcaggtgagagggggtgggctggggtctggggtggcagagaagcaggggaggcgtcttactcattcctctgcttactcatttctgtgaggtgccaacccaagcccttctcacctccctgttctcccactcttggcctgtgttgaatccttttcctgcctgtctttccacattaatgcacctctgcggggctcttgggcagggggttgggtgcacagaaaggtgaacccctggcgttcccacattctccattgctggactcgaggcctcctgtacccactgttcagggtcctctccctacctggcctatttcctcttatgagggtataggtgggccagaggagaggtgtgggctgtctctcacctccaccacatccggaggcaccttcctcttatcttgttcctccccagtaagatgtcccaatggggtcctgttgccaaacccacataaaagttggccactcacttcccctttcagaagccttccctgacctttctcctcccccagaccttgccctctgacttagacctgctctcccctttgcggaacgtggtctcaatctgctcattgcaaatggcaggattgatgggtgtgtccacaggtgaagtgggagggtgcacaggatgcactagcacagagcctggtgcagaagcttctcccaggtgggagccactgtcatgatggacagttagagtcacctctgctcccctagtgactgctgagaagggaaggtcccctgtgtgcagaaccttctccatgggaggaactggaacctgtgtggctggtggaggaaccagccagggcatgaagggatgtggggaccagccttagggacatgtcctgagtccacactgctccccacaaacctcccctgtgaggacctcctcatatgcccacctctgggctgaaatgactcccagaacaaggaaatttttcctctcaagctaagtgggcctctgtgagtggacagtgtgtcttttccttctgccttgggatgcgctcttgggacttgggggtggccccaagagagatagagcaggaggaatgtagacagatagataggtaataggatagatggatggatggatgcacagatagggtgaatagatggctggctggctggataagtaggtgggtagatagacagatagatagatagataacaggatagatggatggatggacagatggatgcatggataagatggatggatggatggatggatggatggatggatggataatacatacataaagtagtagataagatggatacattaggtggatagataggtagagtggatatgtaggatggatagattagatggatggatagatagctagatgattgatagataataggataaatggatgagtggatgaatgtacagataagatggatggatggatggatggatgggcagatagatatatagatagaaaagttagataggatgaatagattagatagataaatgaatagatagataggtaggtagatagataataggctagatggatgaatggatgcacagataggatagatgaatggatagatagacagatatataagatagaatggatggattagatagatggatagatacatagaaacataggtagatagatagattagatagatagatagatagacagatagatacatacatacatacatatatagatacatagataggtagatatgtagagatatatataggtaaatagatagatagatagatagatagatagatagatagatagatagatagatagacagacaggcagacagacagatagatagatagaagagggagtttatttcgggaattggctcacaggattatagaagctgagatgcgtcatggactgctgtctgcaggctggataaacagacactggttgtgtaactgagtccaaaggcctgagacggtggagttctggtgtccaagggcaggagaagatggatgtgccagccccacaacagagcaaattagcctttcctctgcatttttgtgctacctgggctctcaacagattgaatgagctctgcccacactggggagggtgattcttccttcctcagtttaccaaattgaatgccagtctcttctggaaacaccctcacagacggatgatcaactatctgggcatcctttagcccagtcaagtggacacctagaattaaccatgacaggaggtgacggcccctgccttgcttgcaggtcacccccacggagcagggcatgagggtcctgactcagctggtggccacctacccccagggctttaaggtctggatgggccccatcttccccgtcatccgtttttgccaccccaacatcatccggtctgtcatcaacgcctcaggtaccacctggaatacttggtggtgggtgctatggtgcatttgaggcctgcaagtccctctatccccaagccgtgtgtggcccctgcagtactctggtctctcctttccttctctctcagccatcttcatctttctttcatgtattcactaattcccatctcagcatctcctctctccattgccatctgaccccctgtcctggtgttctgggctgccctggggccccaagagacctcaacccaaggccctgtcctggaggaacccccaagcttaaggaggtggatgtggacagagacatccccaacttcatggggtcaagaaagggccagagggagatggatgacagcccagagaagagcaagttctctgctggggcaggctggaagccttcctggaggaagagttactggagccatgtctggaacaatgagtagggatgtttgaaaggagagtgcagggtgatgcaattgggcatcgttagtgttcaaggccccttgccaggtctagcgtcaccttgcctgtcacaaaggttagaacaatgaggacttgtggctggtggaggatctggactgttatttctgtgatgtccatctctggtgtgggtcaagtccttttaccccatcctgtagtttgtctgccctaagttcattgcttttctgctctaggccctgggaatctccaaaaggagactccagcctagtttggggccctctccttgacccctgtgcttcccttcttggacaggccaggctgagcagggaaacaggcagcatcctacagagaccatggctctggcctcaaaatgctgagtgactctgggctggttcccagctgtctctggttactgaggtctctttcagttgtgagtggtggaaatccaacctggtgtagtctaagcaaagaaagagaatctattgattttaaagtccagggaggatggccttcaggcatggctggatccaggtctcacacagtgttacttcctctcttggctttagctttctccacgccacttttggcttgtcttcctttcttggctttagctttttccacgccacttttgctttcaagacagtctttccctcatgacgtcaacaatgagtcctagaagctcaattctcatgggaaagcccacatttcccccagagttcccagaaaaggcccatgatttacttctcctggcctggatcaccagatcaatttttcacccagtccctgtgtttctgattgcctagtctcggcaggcctgggccttctagagctactgttttgggggcacaaagaagtttgatggttaaggaatcaggccatgggtgcagatagacccagtctcaggcctcaggtttgccatggtctgggactatgggcaaattactttatcatttagagcctcagtctcttcatctggaaaatgggatgaatgagagcccagggaacatggtgtgtggatccacatggggaaagagcttttctgtctgtgtaactgaaggactggagagtcctgcatggaggatgtgaggaggaagcccagtgggggctcagcactgagagggagatgagatgctgcttgaaattctcagggagagggcttccacctcttccctgcagatccttctctctcgcagcctaggagagcatgaattgggtcctgtgtctttctctccagattcacagctcggaggaaggtctcctatacacacaaagcctggcatgcaccttcggtgatatgtgctgctggtgggtggggccctggcacgcaatcgtccgcatcttccaccccacctacatcaagcctgtgctctttgctccaggtagacactgcactggccactccaggtagacactgcactggccacgccttgcccacagctggggtctctgtgctgcctccagcgggtcgcgtgcccatgtgcagacaggaggggctgtggtggagatgccactgcttccatctcccctggacttccatctgtctgacctctgttcctgtttgctcatgtctgggaagtgtctctatggtggctgttatatggtcaagtctgctgtacggctacgtcttgtcacctgtatatttacacctgggtcctggttacacctgaaatatgttatacccggttacatctggtatatcattccaactgaggtcatgtagagctggtcatgtgtggagttcatgtgtggccaaggacatttggggcatgtgaggggctgttttgttcttgtcgcaggtgctgtttgacactgccgttttctcctgctggtcacatctgggccatgtttgggggttgtgtgaggtctgggacccagggtccctaagtgaactgtctgagacattatttgagtcttgtctgaggcatgtgttgtagtatgtttgggtcatacgtgaggaacagtctgggtcacgtgttggctatgtctgggtcgttaaaggtaccatatttatattcaacctggagcctgtatgtggaacacgcttttaaggtcatgttagaccatctcatgtgcatgttagagcataccatctcatgttaggaattgtcatgtattttgtggccatgtcaggacttgtgaacacatgtcagtgtcatgtctcatgtctaggtccatgtcagaagatgccatgtgagaatatgtcagagagtgctgggacagacagggtgtcctaagtccttgtgaaggcattctgtagagtgctgagcgtgttcagggtttgcagaacatgttggatcatgtaggaggcatgtcaaggcatgctggagccctgacatagctcctacgtgccatgttaggcagtgtcattgctgtgctgtgctgccgtagcctggtctggtcttccctcccctcccccatcctgccttcttcctctccccttgaccctcttcttgctatgtggggcttggagggaagaagtgcaaacctcttgctgggagcctccccccacccccaaagttcctccttcacctgcctccatggcccctgattgtcctcatttatgtcagctgccattgtaccaaaggacaaggtcttctacagcttcctgaagccctggctgggtgagtatctgtaggtgaacagggttgggaacaacctggggggccaggggagggagatgcccttgcccatggcccttggctgccctgccaggggatgggctcctgctgagtgctggtgaaaagtggagccgccaccgtcggatgctgacgcctgccttccatttcaacatcctgaagccctatatgaagattttcaatgagagtgtgaacatcatgcatgtgagttatttgaagccaaggtcccagctgcagcctttggttggggggaaccacagacagatctagtctggaattttggctctgctgggtgcctctgggccattgtcttcctctctgagctttggtttcctcatctgtaaaatccctacttaaaagaaggtcaaggtgatgtagtggagtcatgtctctggcgcatagtaggtgcccagaaggtgtctgtttctatgttcgcgtcacccgaaccctgtaaactcaagagggtaatgacaacaattgcataatagctgttgctgataagaaacaacctgaaaactcattggtttaaaccaataaaggtttatgaatcctgataagtctgtgggacagttcgtggattcttctggatgtggatggaagggatcagtcatggtacatgagcagcctggggtcaggtaggcagccttgctggtgttggctgagttctctcacatgtttgggttttggctggcttcagaccgatacagatggcctcagcttagacccctggatgttcctccatctgattctctccctccagaaggagtcccatggtttacaatacagatagggttccagggaataagatgaggcttagcttcattagttatcacctcatcatttttaccacattgtattttgacatcaaaagccaatagtccaacacggaatcaatggcagggggtaaaataggctctgtctattattgggagttgctgaaaaagcacattgcaaagggtgtggatatggggagaagggaagaattggggcgaaggttttgtgaagtgtttagaattttttaactttaaaattgatgttaagctagttactgtttcataaattattctggaagaacaagaaactcctgggtcagagacaaaggatagttttactactcatgacacagagagcagcatgtgttgcttgttagattgcacttcttctccaagcctctcaaatcccatgggctgacacaagtgggcttctataaatgcctgctgacatcatatattgcattacagggaaggggcattaggcttaggaatctgtttttatagcaagcagaagcagcatatccagggggtgtcccttatcctcaaagttattttctgcaaacacaactctgagaaatttttcaagttaagaacatcagcgtgttgcatttgtgacatgcccagaaagggtgctcaggactcatggaggactacctctacaaacctaggatatttttataatcaatttataactgcagatgaggaaacccaacatttattgagaactcacaatatgccagaaaaaatgccatgtgcccattccatgatacgagtatatattgtctaatttgattttaacaactctgcaaaggagagattatgtatttctgccccatggtagatgatgaaactgcaggtctgagagattagggagctaacccaagttcacccagctaatgagtgagcttggcatggtggagcagagtttctaacatgaattatatggctccaaagcacatcatcttaactgttcctgaatatctgacaggtgggatataggggagggtaatgagttgactaatggcacacagagcacagaggacagagctggaacttgaacctaggtctcctgactcccaatcttgggtcttcatctcttaatagtaacagcttttgcttgcaccataacctggtgctcccgggtaaagggtccctggggagaagatgaagaggcttattctggggcgtgcatattgattgttggggttggagagctgctcaagggagcaagggacctgccccagctctgtccccttctctggctaggccaagtggcagctcctggcctcagagggtagtgcccgtctggacatgtttgagcacatcagcctcatgaccttggacagtctgcagaaatgtgtcttcagctttgacagccattgccaggagtaagttcttgcccagggtctgggatcctgggccgtggacacaaagttggtaggtggggggctggggaggactgagcagggaaatcagacaaaccttcttggaggagttgttatacctgatcgttgaaggactggtatgaattttatcttgaggtttccagggactcattaaaagggtttgaactggtgggtgtggtcaaagtgggtctctctcagggactgactgtaatgtagcactaaatggagttaacactgatgcaaagaagctagggtggaagctggaccatggaccagttggaagaggataaagtctgagctttgtggacagcttcaggaaggagaaggggcaagactgtatactgggagggagagagggaataggagcataatgtgcaaactatcctctgggtgcctagctgcatggaggcatctcacagagatgggatgcagggagagataagagagcctggagagtcgatttcatgctgatccccatcctgcatctgaggggccatctgttcctggataccccgtttactgataggaggtagctcctagctgctggtgggaggtgatcctggggcttcaggtgtattaaattgttgcctccctttctgcccttatcctgcaggaagcccagtgaatatattgccgccatcttggagctcagtgcccttgtgacaaaaagacaccagcagatcctcctgtacatagacttcctgtattatctcacccctgatgggcagcgtttccgcagggcctgccgcctggtgcacgacttcacagatgccgtcatccaggagcggcgccgcaccctccctagccagggtgttgatgacttcctccaagccaaggccaaatccaagactttggacttcattgatgtactcctgctgagcaaggtgggcctctctgggatctgaattcaagaagtagaagggagcttcatgtgaaatgtcagatgaaagaatttgaacttgacccagagggcactggggagccatggaaggtgattgaggaagggagggacaggtcagagataggttttggagatagctctgtggactagcacctaccaggggactgctaaatgaaattgtgatgagtctgagatttactctatttataagttaataagctaattggccaccttttaatctatatatctacatctatacctatgtctgggtctatgtttatgtttttgcctatgtctttctgtatctttgtctctgagtttgtgtctctctctatgactatgactatgtctatgtctttgtctttttcattggccatatctgtatgtctttgtctgcatctgtgtcttcatctttgtttatgtttatgcctttgtgctctccctccctccctgccttctttttctttctttctttctttctttctttctttctttctttctttctttctttctttctttctttctttctttctttcttttccttccttccatctttctttctttctttttctttcgttctttctttctttctttctttctctctcttctctttctttctttctttctttctttctttctttctttctttctttctttctttctttctttttctctctctctctttcctttttttgacggagtctcgctctatcacccaggctgcagtgcaatggcatgattttggctcactggtaacccctgcctcccgggttcaagtgattctcctacctcagcctcccgagtagctaggactacaggggcacgccaccatgcctggctaacttttgcatttttagtagagacgaggtttcaccatgttggccaggctggtcttgaactcctgacttcatgatccatccaccttggcctcccaaagtactgggattacaggcgtgagccactgtgccccaccttgtcatgtcttttctatgtctgtgtttatgtctttttctatatctatattttcgttcttgtctatgtctatgtgtctgtgtctatgtctttttcttttctctgtgtttgtgtctttgtctcagtgtatgtctatgtccatgtttttttgtctgtgtctatgattatgtctatgtcaatgctatatctatatctttgtctttttttttttttgagatggagtctcgctgtgtcacccaggctggagtgcagtggtgcgatctcggcttactgcaacctccgcctcctgggttcaaatgattctcctgcctcagcctcccaactagctgggattagaggcacctggctaattttttgtatttttagtacagacggagcttcactatttttagtctcaaactcctgagctcgtgatctgcctgtctcagcctcccaaagtgctgggattacaggtgtgagccactgcacccggccatatttttgtctttgaatttgcctgtgcctgtgtctgtttttgtctgtccatgtttatgtctatgagtatttgtgtctgtgtctatgtccatgtctatgtttatgtgtatttgtgtgtctgtgtttgtgtctaagtctatgactttttccatgtgtttctgtgtctatgtctgtgtgtctatgtctttgtctatgtgtatgtctgttgtgacagaggcattaaatctctggatcagagcagctcatgtcttgcttacggcaatactatcagccagagtaggattgtggcactgactctccattcccaagtcaaattcctccaagggcaatgcgatgttttcccctgtacgtgcagcagactttgtaccctaggaaaggcaccctatattatgagtctcagcacattttctatagagagagagagagaggaagaaagagagagggcaccagctttgtgagagattatgtgctttgttctggatgccatattccatagacttacaactcaaatgtctccagggagataagattcatttaccactgtagaatgtgggcaaatatctttgaagcaatacttaatctctaatttccaagacaaattgccatttaattatcctgtaacccaggttgccagtgatttttttctcagaaagttttcatcaagcagaaacatgaaagcattcatgggtcattgagtcttcccattagggaccaaagaaaaggcaaggaagccagggaggaagcccatggggttggggctctggccatggtgaccaagaagggtctaggagagcaagatgggcttgggtttctcgaaagaggatgaatcttcagagactgtctcagattagactcaagagccctcagaggtactgtgactttttatgggggtgggggtggggggttattgccttctctccaggatgaagatgggaagaagttgtccgatgaggacataagagcagaagctgacacctttatgtttgagggtgagggccccagtgtggggctagagtggggacttggatatctccattccaggaacagggtgggtggacccctcgcacttcccatcccccttcccccatcctccctgaggtcctcaatgcaaggttgctgtacaccctcgggtgctgaagcagcccagagacccaagcctgccttgctgccccccaggccatgacaccacagccagtggtctctcctgggtcctgtaccaccttgcaaagcacccggaataccaggagcgctgtcggcaggaggtgcaagagcttctgaaggaccgtgagcctaaagagattgaatggtgagtgcaggtgctggtgccctgttcctgagcctgtctcattggctctgttccccaggtagggaggggagaaggggttgtttttgttgattctgccactattgcttagtgggaataggagcagaggaccacaggcaggacttagtacccatcctgactgtctgggcaaaggttataggcccttaggacagaaagacctgggcttctgagagaattgttgatgatatgtgaggacagataacgccacttagcatgtgttcagcaaatgaacttcccctccactctcttccttttctccaagaaatatttttttgaatgtcttcacttgttgaatgtttgctcttctgttccctaattcctacccttccatccagtccagggatttataagggagacctgggggtaaaattcatccattcttgtccagaacacctgcatcattcatccatccagtcctcgttcagcaaatactctcatactgcattccaacccccacatctgtgcacagcatctttctgtgctctggagacctgggaaggacccaaccagggatctattttccaggtgctcccagcctggtgggggaactgtccctgggcaggacagtcccagcccacgtgggcagggatggggtttacagtaagggaagcaggactaggggggtatagaaagtgtctcagttgaaagcctgaataatgatcagtagataattgggtacagttggggagcagtgctgtaggtcaagaagaccacctggggtcttcgggggaggaagagagagaggagagagagagagagagagagagagagagagagagagagagagagagagagcagggtcaggacagaaaggaggagaaggggagaaagagggagagactgacttgtggtgagatgataaaactggagatggtagcaggggctggctgtggaagccttggggaaaatgttaatggcttcagttttagcccaagggcaatagggagccatgagaagtgtttgaacagggagggacaagtcacatctgggtaccaggaagatctttctagggctagtgtggagggtgtactggagaggaccagctatagaatgagagcgcagtggggacattctgaggctcaagccaggccaggggctggaggaaggagaggaagcattggagtggacgggtgtcttggactcagtgtcctcccgtccatgcctttgcccagcacagcagtcctgggaagggaagaaacatttttatgcttctaaaataaagaatatttttgcaattttattttttaaaacacatttttattgatgcataatagatgcacatagttttgaaatacatgtgataatctaatacattcatataattgataaagatcaaatcagtgtacttgggatatccattgcctgaaatatttgtcttttctttatgctagaaacataactaacataagcaaactactttctaatgtacagtacatattgtaaactacagtgaacctactgatctatcaagtgctaggttttatttctcctatcaaaactcaaattcgtacccattaatcaacttctccttatccttccctcccctctgccaatctatcttcttttttcatgagatccactttttcagctcccacacgtgagtgagaacatgcgatatttgtctttctgtttttggcttatttacttaccacaatgacctccagttccatccatgttgccacaaatgacaaaatttcagtcttttaaatggctgaatagtattccattgtgtatacacactacattttctttatacattcatctattgatagacacttaagttgattccatattttcgttgttgtgaatagtgctgcaataaatacagaagtacagatgtctcttccatatatttattttctttctttgggatagaaatttcttctctttcttttcagtagtggaatttctgggttatatggcagttctagttttagtttcttgaggaacctctgtgctgttctctgcagtggctgcactaatttatattcccaccaacagtgtgtgtgagttcccctttctccatatcctcaccagcatctatcattgcctgtctttttgataaaagccattttaactgggatgagatgatatctcattgtggttttgatttgcatttctctgactgttagtgacattgagcatttttccatctacctattggccatttgtatgttttattttaagaaatgtctattcagatcttttgcccattttaaaatcagatatttggttacttttcctattgagttgtttgagctgcttatgtattctggttattaatcgcttgtcagatgagtagtttgtgagtattttctgccattctgtgggttgattcttcgctttgttgattgtttcctttgctgtgcagaagcttttttgcttgatataatctcatttctctattggctctgcttttgaggtcttacatagaaagtctttgcccagacccatgtcccggagtataaaaccaagatttcaagcaaaattatgcgtgtagtttaaaaaaaatggtcgaaagactttatgacaaaaatgaagttccttattaagctccaccttagcggtgactacagtcaacagttctctgtgtattcttctagaaaatggctatcccgatgcccacatttatatgaactcacactgtgacttttatttatatgaacacttactgtgcttttctttgtaagtgaaagtccataaaatagacacgggtctgcatattatctctgagatcttttgcttttctcaaaatatacattttggaaaatgagtttgtttttaaatttgttctttgtctttaattgacaagttttaattatatatgtttagaggcacagtatgatgttgtgatatatgtatacaacctgaaattattaaatcaaggtaatgaacaaatccatcacttcatgtgtttatcatttttgtgttgagaacatttgaagtttactttcttagcaatttcaactaatacaatacattgttcactaaaggcaccaggctgggcagcagatctcaaaaacttattcctgttgtctaactgaagcttctaccctttgaccaacatttcacccttctctgtccctcccccacccctggcctctggtaaccaccattctattcctatttctatgagctcaactattttaggtcccaagataagtaagatcatgtgtgtttgtctcttctgcacctggcttacttcacttagcatgagttcctccaggttcttccatgttgtggcaaatgagataattttttcttttttaaaggctaaatgggattccattgtgtatatatatatatatatacaccacatggaaaaacaacattaaattacaaaatgaatgataaaaaagagttcttcttgtaccaaatgagacattacagataagactagggttttccttgacaatcctgccacctgacctaatcctttctcattctccaaaggtgtttctagagccatagatttgtttatctatctatctatctatctatctatctatctatctatctatctatctatctatttctatcatctatcaatgtatctatcattgatctatctatcatctatcaatgtatctatcatctatctctattatctgtctatctatctatcatctatgtatctctgtatctatcatctatgtaactatgtctccatcatctattatctatctctctacttatttatctacctattatctatgtatctatctatatcatctatttatctatctatctatctatctatctatctatctatctatcatccatccatccatgatctatctctccaccatctatgaatcattcatttttataaatatatatccatatgcttcttgctgttttacatgtacatatgtatatatttgtcactttttttcactcaacagggtgccttaatgctatctttttctgagtgctgtatattttattccatattttattcagctcatttctatgttgaagaggacattaaacattttcaattatagtcaatatttccaatttgccttccagagtgtctgtactgatttaccttctagcctgcagtatgtggtgagactagtgatccctatttccttcttttgtgtaactgtatagtattccattgtgtggctgtttatctaaacattttcccattaatgtatatttggcttgtctccaaacttttgctaaactggacatgaagctgtcagcacgtgtgcacagtgaccattccttacatgcataggcatctctgcaggacaaattctctgaagtgcaattgctgaatcaaagaccatttgcactgtataatcattatttttttgagacagtttcactcttgttgcccaggctggagtgcaatggtgtgatctcagcttactgcagtctctgcctcccagattcaagcaattctgcctcagcctcctgagtagctgggattacaggtgcccccccaccatgcctgggtaattttttttgtagagatggggtttcaccatgttggccaggctggtctcgaactcctaacctcaggtgatctgcctgcctcggtctcccaaagtgctgggattacaggcatgagccaccatacaatatgactgcaaatcctttactattagctgagttttatggcacaaactttcccataactttaccaatagtactattgtattattgaattttaaatcttggccaattttcatatttcttcttttgatggacatttaaaaaaagtaagagtgaggctgaacatcttttgcacgtgttgatgttatttgctttctttttatggaactggtattcttattatttttcctctttttctttggaccctttaaaagtatttacttttaagaatgtgtattaagattgatttttttctgcctagtgttgcaaaatattgccttttaacttttggagggtacttttgattaatttttatgacgttaagtaggtccacatttttctttcacagctgtaaaatccatcaacttcccaggattttgtttagggtgggtgggggcccctttaccaaatgtgaagttttctcttattctcatgtctttttctgagctctttatgctgttccatgggtctattttcttgtttctgcaacagtgtcacactgtttttattcctgcgactttgtaacaattcttttaaaaagtttatttcgttacagggagaaaaggtctcacttgcaaacagagagaagctggagagttgtgtctttgctcccttgataaggattggggctggggtgtttccttagggacgacctggcccagctgcccttcctgaccatgtgcattaaggagagcctgaggctgcatcccccagtccctgccgtctctcgctgctgcacccaagacattgtgctcccagacggccgggtcatccccaaaggtgccacagcctcagggggaggagcctcctgggtaggaagaggggcccctcaggcagggagcattgtcctgactgcccccttctctcccacaggcattatctgcctcatcagtgtttttggaacccatcacaacccagccgtgtggccggaccctgaggtgcgggccccccgtctctgtttttgtccattccaaggctcctagaggagggggcagggttttgatcaggagaatccaacatcacctccctccaagacacacaccactgtctctccaaggctggcggactgggagaccccacccggcaacccttcttggtctcgcctccaggtctatgacccctttcgctttgacccaaagaacatcaaggagaggtcacctctggcttttattcccttctcagcagggcccaggtaagagcggcctgtgtttgaggcggggacggggagataggtgcaggggtctgggcatgacagtggggaaaagggggacattgtagacggtccgagttccagctctccttccctcacctcctctggagtttatgggaaaaggcccacagagtaggattgggttggtcctagaaggatccctagtgagctcagagctccctcctaccccaccttggtctaggctggggggttggagctcggctaggctcgcaggatatgcaagcccacatggggatccaggcacggatacccccttctctgttcctcaaactgctctaggtggggttgggtgtcccaggccaggttaccggcttgatggggccaggatggggcacctgggtgcagtcagagtttccacctccctccccaaggaactgcatcgggcaggcgttcgcgatggcggagatgaaggtggtcctggggctcacgctgctgcgcttccgcgtcctgcctgaccacaccgagccccgcaggaagccggagctggtcctgcgcgcagagggcggactttggctgcgggtggagcccctgagctgagttctgcagagacccactctgaccccactaaaatgacccctgattcatcaaaagtgaggcctagaattaccctaagaccctgttccacagtcctgtattccatcctagatatctactcaaaataattgagacaagtgttcaaacagaaagacgcttgtgcgtgaatgttcatggcagccctattcacagtagccaaacgatgaaaacaaccccaagctatatattaccagatgaaaggataaacaaaatatggtccatccatacaatggagtattacacagccataaaaaggaatgaagcagtgatccccactacactgtggatgaaccttgaatgcatgatactgaatgaaagacatcagatgcaaaaggtcacatagtgtactgtccttttatatgaaatttccagaacaggccaatctgaagagatgtatagtggattggtggctttcagcagctgtggggaggtgggactgaggagcgactgctaatcaggatggggtttcctcctgggatggtgaaaatgttccggacctagatagtgatgaaggtagcacgacactgtgagtgcactaaatgctattgaattggacactttagaatggttgaaatagtgatttttatgtgaattctacctaaacatgctattacagctcatatatactttttccatctggattcttcacaaaagaatatgttgtgagcatctttccatgatattaaatcatcttaggaaacattattttgtgttcttcaaaatgtgcatgttaagtattcaaatcagtcttaaatttttaaaaatatgtaattttagaaaataatttaaaaggttttgtttcagtttgtaagatttcttttctggcactttaatggcttgaggtatcattatcagttacaaattgagttattcttcatcaaatgacttttggagtagagattttatttttatagcaatagatgcacagatattcctgtaagatacaggtgtggttagacacttttctagaacaggcatgccctgcaaactccacagacactgactgtttttgtcctattaagaagtagaccactgagaagggagaaggtgacattttagctttcccaggtaaaagtggttttcatcctcacaccaattttatggactggacgttaactctcttgctcaaggtcactctgagtggaagagtggggataaatctggttcgtttggcatcagaggccatgacttttcctaccacagaagtaattttcaaagtaagtctctgccctaggcacatcagatcacctggggaccactccagagtgagtagacaagactttgacaggggtgcctaatttttttttttttttgagatggagtctcgctctgttgcccaggctggagtgcagtggcatgatctcagttcactgcaacctccgcctcctgcgttcaagtgattgtcctgtctcagcctcccaagtagctgggattacaggcacccaccaccacatccagctaattgttgtatttttaatagaggcggggtttcgccatgttgcactggctggtgttgaactcctaacctcaggtgatccacccgcctcggcctcccaaagtgctgggattacaggcccggtccagtttgatagtttgttatcatgttatacgtacacttagaataatgatccagccatctcattctaacagcaatgagaacttaggctcccctctctactaaaatacaaaagttagctggtcatggtggtgcgggcctgtaatcccagctactcgggaggctgatgcgggagaatcacttgaaacccacaggcggaggttgcagtgagctgaggtggtgccactacgctccagcctgggggagggggacatagcgagactcggtctcaaaaacaaaacaaaacaaaacaaaacaaaacaaaaacaaaacaaaacaaaacaaaacactgccaaactgtttccaaagcatctgcatcgtgtttaatttccataagtaacgtatgagaattctaggtcctccaaataattagcagtccttcgtagtgtcagtttttgtttcagccttccttatgggtatgctgtggcatatccctgagattttaattcgcattttccagtgactaagggtgttgaaccactcgtgccttcctgtgcctatttgacactcctatattttctttggtgaagtgtctgttcaatcatctgctcattaaattttccttcggttgtttgccttcttattgttggattttgagagttctatgtacaagtcctttgtcagtcgtgtgatttgcaagtcttcttcctagtctctgaagtttctttctttcatagagcaaacgttttaaatttttatgaagtaagacttctcagttttatttttggtgaattatgtttatactgccatatataggaactctttgcttaactggaggtcatggagattttctcctacattttcttttaaaagttttatagtttcagagtttacatgtaattccataatctccatttagttaaattttgtatggggtgtgaactgtggtttgactgttttcttgtatatggatatccaattgtttcacacaatttttttgaaaagaatatccttggcagggcacggtagctcacacctgtaatcccagcactttaggaggtcaaggtgggcagatcatgaggtcaggagtttgagaccagcctggccaatatggtgaaaccacgtctctattaaaaatagaaaaattagccaggcgtggtggtgtgtgcctgtattcacagctgcttggatggctgaggcaggagaatcgcttgaacccaggagtcagaggtttcagtgagccgagattgtgccactgcactccagcctgggtgaaagagctagattctctctctcaaaaaaaaaaaaaaaaaaaaggaaagaaagaaagaaaagaaaagaaaatcctttttgctttaacttgccttgcaggtttgtagaaaactcaattgttgaaatttgggtggatatatttctggattttctattctattccatgttggaccaataccacactgccctagtcactgttgcattatagtatatctttaaaggagtaatgggaatccttcaactacattttttccccaataatttttggctattctgcttcctttgtgtttctatgtaaattttatcatcagtgtgtctatttctacaaatagtcctgatagggtttgaattgggatttctgtgaatctatagatcaatctgaggagacttaataatgatattgattctcccaattcatgaatatagtatacccctgtatttatttgttttcttgaatttcttttatcattgttttgtagttttcaccatgacagtcttgcacatattttgttaaatgtacagctgagaatttaattttttctggtgtacaatgctaataaaatggtgctttaaaagatgtgttcttcagttgtttattgttaatacatggtagaagtttgtatcctgtttttgtaaaaggccacatagtcaatattttaggtcttgcatgccctatctggtttcttcttctctttctccttcttctccttgtgccaccttttaaaatataaaaaccattcttggctcataggccatacatatacagtacacaggccatatttgatccatagaccatggtttgctgaccctgggatataggaatatggttgatttttgtatattgtctgtatattggatcattcttattggaatacaataatgctgttatttcctcagtcttaaaacacttcccctcttggcctcattttcacaccagtcgatgctccatttctttgccccactatgcagcaaactccttcaaagagtgacccacatgtgggtgtcaaatgtctcctctcccactccaaacaggctttgagaatcctctcaggggagtgagggtttataaatgagacataaacccacaggactctgctacatctgtgtatgtaattctcaaaacacactcaggcctggtcttgttactggctgctatgagacctccatcttctcctgagtgagtgtgaaggaggcactctctgctggacggtttggggacaactggccctatagagtctttattagtttcattgtatgtatgtgagagagcaagagaagacagagtgtgtgggtatgtgactctatgtgtttgtgtgactgtgtgcagtgtcgtaacagcacatgtgtgtgcgtgcatacaggcgcatatgtgaggcattctgactggtgttaggtggcgtttcattgtggttttgatttgcatttttatatgatcagtgatgttgaatgtcaggacatgttaagatatattggagctatgtcacatgttccggctttatgtcaggagatggtagaaagtgccaagaaagacgaagtatactaggtccctgtagaggcattttgtagtgttgagctatgctcaggttttgcagaacatgttagactattttggagccatgtcaagtcgtactgtagcatgctgtgccatgttaggctgtcattgctgcactgtgctgctatagcctggtctagtctcctctctcctcccacatcctctcttcttcctctctctttggccctcttcctgctatgtggggcttggaggggagaagtgcaaacctctagctgggagccttcccccaaccccaaagtccctcctttacccacctccatggcccctgattgtccccattcatgtcagccaccattgcaccaaaggacaaggtcttctacagcttcctgaagccctggctgggggagtatctgcaggtgaacagggttgggaaataagttgggggaccaggggaggaagatgaccttgcccatggcccttggctgccctgctaagggatgggttcctgctgagtgctggtgacaagtggagctgccaccgtgggatgctgatgcctgccttccatttcaacatcctgaagccctatatgaagattttcgatgagagtgtgaacatcatgcacgtgagttatttgaagctaaggtcctagctgcagacttggggtggagggaccacagacagatctggtgtagaattttggctctgctgggtggcattgggccattgttcttcctctctgatccctagttttgttttgtttttttttaatctgtaaaatgggtataataatccctacttaaaaggtggtcaaggtgatgtaatggagtcatgtccctggtgcatagtaggtgcccagaaggtgtctgtttctatgattctgtcacccaagccctataaaatcaagagggtcatgacgacaattgcacagtagctgttgctgataagaaaccacttgaaaactcattggtttaaaacaataaaggtttatgaatgttaataagtctatgggacagttggcaggtccttctctatgtggaagggatcagtcatggtacatgagcaacctggagtcaggtaggcagccttgcaggtgttggctgagttctctcaatgtttgggttttggctggcttcagactgatacagatggcctcagctgggacccctggatgttcctccatgtgattctctccttccagaaggcaccccgtggttcacaatgcaggcaggcaggtttccacggagtggcacgaggcttagcttcattagttattacctcatcattttcaccacattgcatttcatcattgaaagccataatcccagcacacaatcagaaaaggagaggaggagtaaaataggctctgtctcttaaggaaagtcgctaaaaaatcacattgcaaagcgtgtggatatgggggtaagtgaagaattggggcgagggttttgtgaagtctccaggttttattaaacttgcaaattgataagttagcttgttactatttcatggattctgccagaagacaggagactcctgggtcagaggcaaagggtggtttattactcatggcacagcaaggagtatgtgtttcctgtcagattgcattgtttctccaggatacccaaatcccttcgggtgacattgttgggcttttataaatgcctgctcaggtagtatgttgcattacagggaaggagcattaggcttagggaatagcaagcaaagtaagcctgatacgggtccaaagggagtcattaccttattcttgaacactgttctctgcacacacaactctcagaaatggctgaagttaagaactcagtgttttgcatttttagcatacccaaaagggatactcagggctcatggaggacttcctgtcccaacatagagatatttttgtaatcaatttataacaaggcagataaggaaagccaacatttattgaaccctcactatatgccataaacaatgccatgtgcccatcccatggtatgagtgtatattgactgatttgatgttcactgttctttgaaggagatatttttgcctcactgtagaggatgaagctgtgggtctgagagattagggagcttgcccaagttcacccagctaataagtgagcttggagtagtgaaacagggtttctaaccttgtttatgtggcaccaaggcaatcatctcaactgttcctcaagatttgacaggtagaacatagggaaggataaggagttcgttcaccaaggacattcagagctggaacttgaacccaggtctcctgactcccagtcttgcatctccatctcttaatattaacaacttttactctcactgcaatttggttacccctggggagggattcttggggagaaaatgaagaggctggaatagtgtgccttggtggttgggtttgggaggggctcaaggaagccagggacaagcaccagctctgtccccatctctggctaggccaagtggcacctcttgaccttggagcacaatgcctgtctcgacatgtttgagcacatgaacctcatgaccttggatagtctgcagaaatgtgtcttcagctttgacagccaatgtcaggagtgagtctttgcccagtggctgggaatttgagccatggacccaaaggagtaggctgggggagagagaactgatgagggcaagcagaagtgcctacctggaggagttgtgtcacagtctttgaatgactggtataaacattatcatgaggtttccagggagatattgaaggggtttgagctaatgggcatggtcagagctgagttctgtgagggactgactgtagtgtggacactaaatggagttgacattggatgcagggaggctagggtagggtagagacagttggaagaggatgaggtctgatctttgtgaacagtttcaggaaggagaaggggcaggattatataccgggggcaggggagagagaataaatgcatgatgttcaagttatgctctgggtgcctaggggcatgaaggcatctcacagagatgggatgcagggagataagggcttggagaatcaatctcatagctgaccccctctctgtatgtgtggggtcatctgtttctgtatactctgtttcctgataggaggtagctcctagctgctgatgggaggtgcttctggggcttcagacatgttaagttgttgcctccctttctgcccttatccttcaggaagcccagtgaatatattgcctctgtcttggagctcagttcccttgtggcaaaaagaaaccagcagatcctcctgcacatggacttcctgtattatctcacccatgatgggcggcacttccacagggcctgccgcctggggcatgactttgcagacgctgccatccaggagaaacgccacaccctccctagccagggtgttgatgacttcctccaagccaaagccaagtccaagaccttggacttcattgatgtgctcctgattagcaaagtgggcttctctgagatttgaattcaagaagcagaagggagcttaatgtcaaatatcagatcaaagaacttagacttgatccagagggcactggggagtcatggcaggtgcttgaggaagggagagacaggtcagagataggttttagagatgactttgctgaatgcacctagcaggggactgctagatgtgaaactgacaagtataagattttactctatttatgcattaataagctagtctatataagtattaatatatctatatctatatctatatctatatctatatctatatctaatgtctaggtcattgtccatgcctgaatttgtgtctgtgtccatgactatgtctgtgtctttgtctttgtcattgcgagtgtctgtctttgtatctgcttctttttctttcgttgtgtctatatctatgtctttgtgtcttttctatgtctgtgtctgtcttttctttgtctatatctttgtcaatgtctatgtttatgtctttgtgtatgtctgtttatatctttatgtatgtcttcatctcagtctttatgtctatgtttagtgtcttttctgtgtcaatgtctatatctagatctatgtgtctttgttcatgtcatatctgtgtatctatgtctttgtctttttctgtgcctgtgtctttgtctatgtctatgtatatttctgtgtctctttgtctatgtgtatgtgtatgtgtatgtgtatgtctatgtctgtgtctatctctttctctttgtcgatgtctgtctatgtatttatctacatctttgtcaatgtctgtctttgtctatgtctgtgcctatgtctatgtcatgtttatgcctttgtatatgctcatgtctatatctttctctatgtctgtgtctgtctttgtctaattcttggtctttgtcaatgtctacatctttgtctatgtctgtgtctttgtctgtttcttttctttttctctttctttcttttttttttttttttgagaaagattcttgctctgttgccaggctggagtgcatgcaatggcatgatctcggctcactgcaacccctgcctcctgggttcaagtgattctgcttcagcctcctgagtagctgggactacgagtgcccgccaccacgcccagctaatttttgtatttttagtagagatgggatttcaccatgttggccagggtgcgctagatcttctgaccttgtgatctgcctgccttgacctcccaaagtgcagggattacaggagtgagccacggtgcccagcgtctttgtctgtttctatttatgtctacatctacatctttccctacgtttatgactttgcctatgtctatacctttgtctatgtctatatctttgtctatatttgtgtctgtgtctatgtctatatctatgtctttctctatgtttatgtctatgtctttttctgtccatgactttttctattgtgacagatgtctattgtaacaagtgcattgaacacctggatcacagcagcccatttattgctcacagtgacactagcagccggagtaggattgtagcattggctttcattcccaaatcacatttctccaagagcaatgcaatgtttttatctgtatgtggaacagtgtttgcgccctaggagaggggctccacattacgagtcttggcacattttctatttattttctcgacagagagagagagagagagagagagagagcgagagcaagagagagtgctttattctgaagcataaaccaattctctccagtgagatgtaatagtctgtagacttacaacacaaatgtcttcaggggaaataaataagattgtctgcatttaccacactggaatgtgagtatacatctttggagcaatacttaatctctaacttccaaggcgaattgttatttaattatcctgtaagctcatttgccagtaactttttctcagaaagttctcaacatgtagaaacatgaaaatattcatgtgtcgttgattcttcccaccagggacaaaagaagaaggaaggaagccagtgaggaagattgcatggtgtgggctctggtgatggtgaccaagagacatctaggagtgcaagctgggcttgggtttctggaaagaggatggatcttcagagtttatttcatgttagactgaggagtcctcagagcttgtgtggttttcaagggtgtttttccttctctccaggatgaagatgggaaggagttgtctgatgaggacataagagtgtaggctgacaccttcatgtttgagggagaggatcccagtgaggaccaagatgtctcatcccagggacgtggtgggtggaccctggatggcttcacccttcccatcccccttcccccatcctctctgaggccctcaatccatgggtgctgtccaccctgttgtgctgaagcagcccagagacccaagactgcctggctgcccctcaggctatgacaccaggaccagtggtctctcctgggtccagtacaaccttgcaatgcacccagaatgccaggagcgctgcgggcaggaaaggcaagagtttctgaaggtctgggagcctaaagagattgaatggtgagtgcaggtgctggtggctgttcctgagctccatgactcatgttggcaatgccgatggctctgctccccaggtggggatgggaggaggagttgtttttgtctattctgctactattgcttagtgggagtaggagtagaggatgacaggcaaggcttaatacccagtctggctatcaggggagaagttgcaggctgtttggacagcaaagatctgctctgctgagagaattggtgacaacatgtgaggggagatgatgccacttaacacatgtttagtagatgaacttcccctttactcccttctttttatccctgaaatgtcattttgcatgcataatctgttttcgttattgcaacaaccttgtgaggtgctgctgctgaaacgcccatttacggacgtgaaggagcacagcctggtggtgaggggggcacaatgtgaggctgggtgggtggtctgggtgcacagcccagatccaccagctctatgactgtgggtagtcactcaaatattttccagactggatttctcatttgtaaaatggaaaaacaaaatggttaatatagttaaaagacttaaaacaggctccatgactcatgttggcaatgtcgatggccgccattcctgctctaacctgcttgcccatcccaggcacacaggaggtctgcagtgagctgagcccctctagccactgggggcactttcttctgtgtccctaggaccctgcctgttcatcaacccctggctttgctccctgagcctaagaaggatggaaccaccagcaggtgaggtctgtccttgcagaggtagtggggattttgggggatgcaccctacgcgaatgaagctgtaggaccaggtgcctgaatcccctggctgattgagctggcaggggtggtggggtgggggtggtctaggggctccccagtacccagccagtgtcaggagtactgtcttccccaccctcctgctcagcagttctgctaggagccccctccttcaagcgcccccctcacctgagtccaccccacaggacaattcaggacaggatctagggagggccaggaggggagccctggatctgttgggaggagaatcctgcatgtgggagaaggagccaggtgctgatccaagggcctcaagatatttcccctttggggctatcacactgcctgagattactccattataaatgtccctatattaatatggcattgacactaaagaatgggggtggagcagcatggcagagggaacggatttggacttgagggtctcatagtcttgagttcctatgagctctgcaacttggactagaggcctgccctctctgagcctcagtttgcttttgtgttaaatggacaccttctctcctctggatgccatcactcaggtctcttcaacaatgcccagggttctggcctagggagctgttgggagggtggtgggacagctttgggcactgtgatgcaggtgagcatctgatacaagcaggtgcacgttatatagagcacctggcacatagtaggtgcaccttatgtagagcacctggcacacagtaggtgtactttatgtggcgtacctagcacatagtaggtacactttatgcggcatacctggcacacagtaggtgctctttatgtagcatatctggcacacaataaggcacactttatatagtgtacctggcacacagtatgtgtgctttatgtcaagtatgttgcaccgagtagttttactttatgtaggggacctaacacacgggagaagcattttatgtggaacatctggcacacagtaggtgtgctttatttagagcacctggcacacagcaagcatggtttatataaagggccagggactcaagatacaggatttgtgaagggctcccagcatacagtagacagtatttatgtggagctcctggcacacagtaggtgcactatatgtagaatagccagcacacagtagacaagatttatgtagattacttgatgcagagtaggtgcgctttctgtgggtcaccaggtacgtagtacacatgctcaatgtggagcacctgacacacagtaggtatgctttatatacagcacatggcacagagtaggcacgctttatatgaagtactctgcataaagtaagcttacattatgtacagcatgctgcacacagtaggtgagctttatgtggcatacctggcacatagtagacagaatttatgtacagtatctgatacacagtaagtgcactttatatagtgaaactggcacacagtaggtgcacacagtagtgctttccgtacagtctttcgcatggagtagagacaggcacacagcagctcaagtgctagttgtcatccccttcccttcagtccctctttttggagctcccttttcttaggagccttcctccgtcgccctctaaggcctcatctgacatcccatttcccagatgggaagcctgagcccaggatggccacactgcccacagtcagagaaaggacagggcagaacaaggactccactcgggatccccttgctctgccctcccctgcctggaccccgtcagctcaaggcccctctcagcctcatcccctgtgcctccgctctgtcctcctaagctgagcccagcttctaggtttgctcctccagctgggctctttatccccagaatctgacgaaggtaatcctcagcggggttggggctggattctttcttcctgcttcaagcagtcaggcctcaactcaggccctgggctgccaggaggcaggacttgaactcttgccaggctgtgaagccagagatgagaggcttctgtctctgaatctcctaagtctgcaccaagatgtagtgcctgacatcctccccgcccatgtttggagaggagcccagatgatctgggacaagggttggcctggcccagctcagctggctgccaactgtcatgataagtatatgcttttatctgaacacccttgtcttggaagggcagggtggaggtaaacttggggttcagagtcccctctaaccaccctccaacttcccctgcaaactcccaagaaggtactgagacctgagaattcagtgctcgtgctggggcaccctgagctgcacccagtgggcccaaccccaggttttggctggctgcccaggcacggaagacacacccaggctgtggggattggctgcctcagcccagcccagcccagccccgcctcctacggccttccctagatcaggggccagggccaaagacctcccagcagaagaggagaagaggttgtgtgggacaagctgctcccgacagaaggtaccaggctgggggtggcagggctggaaggtcctggcctgggatgaagaggggactgcctaaggctggggtggctccaagatgctggcatgggaaactgggggtttcctggtaactggactcctagcaaactcccaaggattcaggtggggcccttctggactctaatcggcccatctctttccctttctgtgtggttaccaggttactggaggccacttagttgttggttttggttgggactttctggacttcagatctcagccctcgtttactcacccctgagccctccctgccctgcccccagcagttcctgacttcgcccctatacactgtccccggagctcttccctgggcctcaggtcctcaccctgcatcccctctgccctgcaggatgtcgctgctgagcctgccctggctgggcctcagaccggtggcaacgtccccatggctactcctgctgctggttgtgggctcctggctactcgcccgcatcctggcttggacctatgccttctataacaactgccgccggctccagtgtttcccacagcccccaaaacggaactggttttggggtcacctgggcctggtgagtgtgacagcaaaatgtgtctggggtctcagggtggatggacttccagaggagcaggaatggggctcagtgagctaggtattgatggtggctggggtctgcgaccccagagaagcaagagagatggctcactcattcctctgctaactcactcattcctctacccactcactcctctacccactcactcactcctctacccactcactcactcctctacccactcactcattcctctacccactcactcattcctctacccactcactcctctacccactcactcactcctctacccactcactcactcctctcctcactcactcattcctctcctcactcactcattcctctacccactcactcactcctttcctcactcactcactcctctcctcactcactcattcctctcctcactcactcattcctctcctcactcactcattcctctacccactcactcactcctctacccactcactcaatcctctacccactcactcactcctctacccactcacacattgccctcctcactcactcattcctctcctcactcactcattcccctcctcactcattcctctcctcactcactcattcctctacccactcactcattcctctcctcactcactcattcctctacccactcactcattcctctcctcactcactcattcctctcctcactcgcgcattcctctcattcgcgcattcctctcattcactcattcctctcctcactcactcattcctctcctcactcttattcgtctgctcactcactcattcctctgctcactcattcctctcctcattcactccttcccctcatcactcactcattcctctgcccactcactcattcctctacccattcacttattcctctatccactcactttttgctctccccactcactcattcctctcctcactcactcattcctctcctcattcactgattcctctacccaccgactcattcctttcctcattcattcattcctctgcagttccatgccaaacctttctcacctccctgtcctcccacctcagcctgcttggatccttttcctgcctgtcttccctaccgtagtgcccctcccagaggctcctgtatggttgtggggtgcacagagcagggctctcctggcattcccaccttctccactgctggacttgaagccttctgagccccgatagacaggctgctccctgcatggcccatttgcttgtatctgcccatctctgggctgctgctttcccgcaggaattatctctgacttccttccccacggagggacacagctggaccagaagagaagtgcaggcagtctcccacaccctctccttccagggacaatgtgctcttccccagtaagatgtcccagtgagccctgtagcccaacctggatataatttggccactcccttcccctttcagaagccgtccttggtactcccaaacctttccctccgactgggaccggccctcccctttgggggatgtggcctctgtctgctcacttacaaaaggcaggattgatcggtgtgtccacaggtgcacaggaggcactagcacagaacctggcataagtgaggctctcctaggtgggagctgccatcctgatggacattagagtcacctctgctcccctggaggctgctgagaatggagggccctcaggacgcaggccctttgtctgtgggaggaaccagtgcccatgtggaccaaccaggacacaaaaggatatggcaaccagctctagggatatgtcctgaggccacactgctgcccacaaacctccttccatggggaccttcccatatagcaatccccagattgaaatcaatccaggatgagaaaacacatcctcttgagcagacagcttgtcttctctctctgctttggtatttacccttggatcttggggacagctccaagagagaaggagcagaagtcagcagaaacccactgcagctgctgagaatccagacacgctgctcactgcagaggctgcaccacatccggtggctgtggggggacttgctgtggcttcatctagggaggtgcattagtcagggttctccctagaaacggaatctccttagaaacagatagggtgtttcttcttatctctaatgcatgtatgtatggagacagaaagagatagagagataagaatttattatgggaattggataatgtgatgatggaggccaagaagtcccatgatatatcatctgcaagccagaaaccagggacactggtggtgtaaattcagcctgagtccagaaaggcctgagtccctggagttctgagggcaggagaagacggatatcccagcagcagaagagagagcaagttcttcctttcctctgccttttgtcctgttcatgccctcaatggattggatggggtctggcgtctcagggtgggtggacttccagaggggtgggacttccagtaggggttcagggagctgtgtattgatggtggctggggtctgggaacccagagaaccaagggagacggctcactcattcctctcctcacttactcattcctgtgcccattcactcattcctctcctcactcactcattctaataccaactcactcattcctctcctcactcactcattcctctcctcactcactcattcctgtgcccattcactcattcctctcctcactcactcattcctctcctcattcagtcattcctgtcctcactcactcattccttttctcactcattcattcctctcctcacccactcattcctctgcccactcactcattcatatcctcactcactcattcctctacccacactcattcctctcctcactaattccaataccaactcactcattcctctcctcacttactcattcctctatccattcactcattcctctcctcactcactcattcctctgctcacttagtcattcctctcctcactcaactcattcctcactcactcattcctctcctcactcactcattcccctcctcactcactcatttctctcctcactcattcattcctttacccactcactcattcctctacccactcactcattcctctcctcactcattcccttcctcccattcctttacccactcactcattcctctcctcactcactcattcctctcctcacttactcattcctctccccactcactcattcctctcctcactcactcattcctgtgcccattcactcattcctctcctcactcactcattccaataccaactcactcattcctctcctcactcactcattcctcccctcattcagtcattcctgtcctcactcactcattcctctcctcactcactcattcctctgctcactcactcattcatatcctcactcactcattcctctacccacactcattcctctcctcactaattccaataccaactcactcattcctctcctcacttactcattcctctacccattcactcattcctctcctcactcactcattcctctgctcacttagtcattcctctcctcactcaactcattcctctgctcacttagtcattcctctcctcactcaactcattcctcactcactcattcctgtcctcactcactcattcctctgctcactctctcattcccctcctcactcactcatttctctcctcactcattcattcctttacccactcactcattcctctacccactcactcattcctctcctcactcattcccctcctcccattcctttacccactcactcattcctctcctcactcgctcattcctctcctcactcactcgttcctctcctcactcgctcattcctctcctcactcactcgttcctctcctcactcactcattcctctcctcacttactcattcctctcctcactcactcattcctctcctcactcactcattcctctcctccctcacttattcctctacccacacactcattcctctcctcactcactcattcctctacccatgcactcattcttctcctcactcattccttcctctcctcactcactcattcttctgctcgctcactcactcattcctctgctcactcttattcttctcctcactcattcctctcctcactcactcattcctctcctcactcactcattcctctacccatgcactcattcctctccttactcactcattcctctcctcactcactcattcctctcctcactcactcattcctctcctcactcactcattcctctcctcactcactccttcctctccacactcactcattcctctcctcactcactcattcctttcctcactcactcattcctctgcactactatttccatcctgtttaccttcaaatgctaatctcttctcaaacaccctcacagacacacacagcaataatgtttgactggctatctgggcatcccttagcccagtctagtggacacctaaaattaaccatcacaggaagtgacagcccttgacttgctttcagatcactcctacagaggagggcttgaagaactcgacccagatgtcggccacctattcccagggctttacggtatggctgggtcccatcatccccttcatcgttttatgccaccctgacaccatccggtctatcaccaatgcctcaggtacccatgcagagcttgtggtggtgggtgccagaccaagcttctgtgtggtctctgcagtacccacgtccctccttgagtactcgtgcccctcattgagacttccttctcaatgtcttctccctccattgccatctgctccctgtcttggtgttctgggcaccactggggctccaagaggcctcaattcagggccctttctggaaggaacccccatgcttaaggacacgggtctagacagagacatttccagcctcatagggtcaggaatgggcaagagagagatgggtatgacaacacagagaactgggtgtctgctggggcaggctggaatgtttcctggaggaagagttgttggagctatgtctagaccaataagtaggattttttaagtgtggggcaggatgatgcagtgggcatcattggtatttggggtcccagccagtccttgcaccagccttgcccatccctcagtccaaagcggtaggaggatttgtggctggtggagaatctgggctgctatttatgtgacatccacctatgatgggtcagttccttctacctcatcctatcactcatccaccctaagtttcctgctctcctcctatgggcttcaggattctccaataggagaacccacaccagctgcttgacctccccttgctctctgctcttctcatccttggacacaccaggctgagctagggaagtggcagcatcccacaaaatctatggctctgacccccaaatccttagtgactctgtgcaggtcaccagctctctggctgctgaggtctctttcagttgtgagtgatggaaactcaacttcgtgtgctctaagcaaataaagagagtcaaaggagtgtaaatttcagggagggtggtcttcaggcatggctgaatccaggtgtcaatgaacattatcagggatctgtctccttttcttaatttcaccatttctctgcatcactttttcttttaaggcagccgttctcttatctgtcaaccatgggtcctagcagctcagttcttgtccgaaagctcaccttacccccaggggtcccataaatagccgcctatagtttcaatattatacctggttatatcttttctgtttaacctgggatcatatggagaagtcatcatgtgtgtggctcagctgtggtcgaggacacttggggcatgtcagagactttctggttcttctctgacatgtgatttgaaattgtcttttctcctccttgtcatctcttggccatgtttgtagcttgtccaaggtctgggagctagggtctctttggaattgtcagagttattattttagtctccctgagccaggtttcggaatccattctaatcacgcttgaagaaaactcttggttccacctgggacatgtctgggacatttaagaaatcacatttaaaccctatctggggcctgtctgtggggtacacagaggtcatgtcagactatctcaggtccatgtcaggagatgacagagagtgctatggcagacagggtgtccgaggtcctttaaaggtattttgtagagtgtggagctgtgttcagttgttgcagaacatgttgggatatataggagccatgtcaaggcgtgctggggtgtgctatgacctgttaggttgtgtcatagctttactgtgctgttgcagcctgggctggtccttcttcctctatcctcccttcgtcctttgcccttggcccccttcctgctatgctgggcatggagtggggaaagtgctggtaggcagccttgccctatacctgaagttcctctcttgccctctacatggcccctgatggtcctcgttcatgtcagctgccattgcacccaaggataatctcttcatcaggttcctgaagccctggctgggtgagtacctgcaggtgaaaggggttggggacaaccttgcggggagggtaggggaagtgctgctcttgcccactgtccttggctgccctactaggagaagggatactgctgagtggcggtgacaagtggagccgccaccgtcggatgctgacgcccgccttccatttcaacatcctgaagtcctatataacgatcttcaacaagagtgcaaacatcatgcttgtgagtcccttgaagtctgggtcccagatggagtcttggggtggagggaccatggacacatctggtctggaattttggctcttctgggtggcactgggccattgctcttcctctctgagccttggtttcctcatctgtaaaatggggatgataatccctacttgaaaggtcatttacttggcacacagtaggttctcagaaggtgtcagtttctgtgtttttctcacagaatccctgtaaactcaagagagtaaaaatgaagattgtgtagtagtcattgctgattataaaccacttcagaactcattggcttagagccataagggtttacaattgctaacgagtctgtgagacagctggccagttcttctggatgtggaagggatcactcttggcacatgagcagctgtgggtcggggggcagctttgctgatcctggctcagttcattcacgtttggggcttcagtaccttcagactcatctgggatgggctcagctgtgacacctggactttcccccatgtgattctctgcctccagaaggcaccctgttgttcacatggcagagactgggctccgagaaactgagaggaggctgcaatgtctgtggacattgtctctgcaatacttcaaagttcaaccaggtttgagtctattagagttattacatcatcatttcaccacattgtactggccaaagaaagtcgaaagtcaaaagtccagtacagactcaaaggggtgtaaaatagaacgcatctcttaatgggagttgctgaaaaattactgtggaaagggtacgaatacagggagaagtgaagaattgggggtcaggattttgtgaagtgtctaggatttgttttaaatatgcaaactgataagttagcttgttactgtctcatgcattctaacagattcctgggtcagagacaaagggtagttgattactcatggcacaataagcaacatgtacttcttgttggtttgtatcctttttctgagtcaacctaaattccatgggggtgacactggtgggcctctacattagcctgctcatgcagtacattgcatgacatacaatgggcattaggcttagggaatctactttaatagtggcagaaacaagcctgatattggtccaggaggagtcattgccttatctctccaggtggttatctgcaaatacaactctgagaaatggctcaggtaagaacatcacagtcttgcattggtggcatacgcagcaaggatgctcagggctgatgaagaagtgcctcttccaacacagggatatttttgaaatgaatttattacaatggagatgaataaagcaaacatttactcatcatatgcctgagaaaatgtcatgtcccaatgccaggatataagttgtctaagttaattttaataatcctgtgaggttatggttatttttgtcctattgcagatgatgaactgagggccagagagattagggagctggacagagttcaaccagccaggaagtgagctaggactggtggagcagagattctatcctggtttatctggccccaaagcagatcaccttgaccgttattgaatatttgacaggtgggacctagaggagggcaatatgttgaccaagggcacatagagcataggagacagagctgagacttgaatgcaggtctcttgactccaagccatgggtcttcatctcctatactaacagtttctgctcgcatcccagtctggtcctcgctggcaatgggttcctggggcagaggaccaggaggctggttgtgggggagtccatcctgatgtttgggactggggaggggcacaaaggaggcagggcccagctctagctctcttcccttctctggccaggacaagtggcagcacctggcctcagagggcagcagtcgtctggacatgtttgagcacatcagcctcatgaccttggacagtctacagaaatgcatcttcagctttgacagccattgtcaggagtgagttccttcctagggcctgggatatgaatccatggaccaaagggagaaagttggggagggaggaatgagcaaagtaaccagaagtacctttcgggaggatttgtatcatagctgtgctttgaaggtcgaggaagaggagaaagtgctgtctttccaggtagaaatatgtgtgtaaaagcaagaaggttaggatgagccaagcatgtgcaagagacagtagaaatgaggttgtggaagtaggggctagatattaagggcactgaaaatcaggaaaagtggtatgaagtttatcaagacatttccagagaccttttgtagtttcagctgatgatggatgtgataagagctgagctgtgtgggaaactgatagcccaccaccacgcccagctaatttctgtattttcagtagagagggggttcaccatgttgtccaggctggtctcaaattcctgacctcaggtgatgtgccctctttggcctcagaaaatgttgggattacaggcatgagccactgtgcccagctgcttcttctttcttacagggtgaaagagagagggagagagagagagacagagagacagagagagagagagagaaagagagagagagttggttatgctgggggctggagcagggctgaactggaagaggatgaagtctgagttgtgtggacagttttggtaaggaaaatgatcagtactgcatactggatgggagacagaggagagaagcatggtgtccaagctatactctaggtgcctaggtgcatggagacagctctctcagagataggatgcagggagagaagacagtctagagagtcagtctcatgactgatacccaccatgtatctctaggaccatctatttctagatactcagtttcctgatgggaggtagctcctggctgctggtgggaggtgttcctggggctttgcatacgttacattgttgcctccctttctgcccttgctctgcaggaggcccagtgaatatattgccaccatcttggagctcagtgcccttgtagagaaaagaagccagcatatcctccagcacatggactttctgtattacctctcccatgacgggcggcgcttccacagggcctgccgcctggtgcatgacttcacagacgctgtcatccgggagcggcgtcgcaccctccccactcagggtattgatgattttttcaaagacaaagccaagtccaagactttggatttcattgatgtgcttctgctgagcaaggtaggtttctctatgatctgaatttaggtgagagaatagagcttcatgtcaaatgtcaggtgaaataaattggttttgatccaaagggcactgggagccatggaagatgcttgagaaagggaaggtcacagataggttttagagatgactttattgcatgcagcccacagggcactgctaattctgaaactgtgaggagcatgatattttattcaacttataagttagtgtgttagtctttcacatttttatgtgtatctatatgtctatgtctttgtctatgtctgtatctatgataaaagatgcaccaaacccctggatcacagcagcccattaattatttacagcagtaacagcaggtggagtaggatggtagtgctggctccccattcctagggcaacacaatgtttttacctgtaaatgcacaagaatttgcaccaaggagaggggcccccacattatgagtattatagcttatataggacagctagctcatatgctccttctttattacagggtgaaagttagagacagagaaagagagagagagagaatgctttgttctggcgtataaactacccctctcctgtgagatggcaatttctagagttttataacccaaatatcttctggaaagataagattctctgggtttaccactctagaatgtcagcaaatatttttggagcaatacataatttctaacctccaaggcaaattgccattcaaatatcctgtaccccaggttgccagtatctttttctctgaaagtctgtattatgcagaaaaatgaaaatattcgagaaccattgattcctgtcaccagggtccaaagaggaggcaaaggatctgggggaagcccttggagttggggctttggtgatggtgaacaagagagatctagacgtgcagagtgcatttgagtttctggaagatcagagcttcagagattatctcaggttagactccggagtctcagagatagtataatttgtgtgtgtgtgtgtgtgtgtgtgtgtgtgtgtgtgtgtgtgtcttgctttctcttcaggatgaagatgggaaggcattgtcagatgaggatataagagcagaggctgacaccttcatgtttggaggtgagggtcccagtgtgggactacagtggagacagaggtccctccatctcaggatccgggtgggtggaccctggatcactccattctgcccatcttccccctccctccatcctcctgagggcctcaatatctgggcgctgtccaccctccggtgctgaagccaagcttacctggctgctcctcaggccatgacaccacggccagtggcctctcctgggtcctgtacaaccttgcgaggcacccagaataccaggagcgctgccgacaggaggtgcaagagcttctgaaggaccgcgatcctaaagagattgaatggtgagtgcaagttcttctggcctgttcctgagcccatcattggttctgctccccaagtgaggaggggtggaggagttgttttgtggattcttccactattgcttagtgggtataaaagcagaggaccacaggcagggcttgataccaagcctggctgtcaggggaaaagttgcaggcctttaggaccgaaagacccgggctgctaagagaattggtgacaatgtgtgaggacagataatgctactttgcacatgttcagcaaatgaacttcccctccactctgtttctgttctcccagaaatatcagttttttcgaaaatcctcacttcttgaatgtttgctcaggtggggagggagaagttgtttttgtcaattcttccattattgcttagtagtactaggagcagagcacagaggcagaacttggtatccaacctggctagcaggggaaagttttcagacttttgggacagagagtcctagcccgctgagagaactaaggacaatatatgaaggcagacgatgacatctagacatgttcagtcaatgaattttcccttcactcctttcttgtttactctgaattatcatatttttttcaaacatctttacttcctgaatgtttactcttctgttccctaattcctaccctccggtccagtccagggagtcctaagggagacctgggggtaaaagtcatctatcttttgtctagaacacctgcatcgttcatccattcagtcttcattcagcaaactcttccacatgcctttccattgccagttctgttcccacacctttctgtgctctggagacctggaaagaaccctgcctatggatgtgttttccaggtactcccagcctagtaggaacagtcccccacaagacattcccagtccacataggcaaggatggagttgagagcaagagaagcatggctgggagtacagaaagtgtgatagaaagtgtttcaagccagatctggtggctgtcgcttgtgataccaagtaccgaggaggctgaagtgggataatcacttgaggtcaggtttaagatcaacctgggcaatatagaaagaacccatttctaaaaaagtaaaaaaccaaaataataaagtgcctcaactgaaaccctgaatggtgatcagtaggtgtttggatgcagtagtgccctaggtcaaaaagaaagtctgggcaaaaatgcaaaaagagggagcaggagagagggagaagagggaaagagaggtttgtgtgtcagggaaggagatggttataaagggagggagaagtaagagggaggaaaagtgagggagagcaagataaagagaggagggaagacagaaggagacagagagagaatgagagagaaaggaactgagttgtgatgagataataactatggtagtgaaagcagagtctggctgtggaaaatatgggaaaatggtaatggcttccattttaacccaaaggcaatgggaagccataacaagtggttgagcaggggaggggcaggtcatatctgggcaccagaaagatcttttcagagctactgtggagagaggaccagctgtagaatgaagtcccagtgaagacattctgggacctgagccagggcaggggctggggatggagaggaggcaatggactggacatgtgttttggaggccgtgtcctcccgtccaagcctttgctcagcacagcagtcctaaaaggtggcaacactttttatgcttttaaaaaccaagatatcaagtaatactgtgcactttgtaaacaaaaaaaagtgtctaaaacatttataaaaatgagctttcctcatgcctgtaatcccagcactttggaaggccgaggcgggcggatcacgaggtcaggagatcgagaccatcctggctaacacggtgaaaccccgtctctactaaaagtataaaaaattagccgggcgtgatggcaggtgcctgtagtcccagctactctggaggctgaggcaggagaatggcgtgaacccgggtggcggagcttgcagtgagctgagatggcaccattgcactccagcctgggcaacagagtgagactctttctcaaaaaaaaaaaaaaaagagcttccttcttaactgtcaccctagtagtttctaccatcaatggttttgtgtgtccctccagaagatggctatcttgatgcccactttataagaacacagacttcttctatacaaataagagtgtataaaatagacacagtactttttcccaagatggtgggttggaggcaatgtcagtgtgcctctcccatgtggaaggacagaatagtgtgtagagattcacagtgtaagctttcttttcccaagaaacaacacagggacttaacaggaaaaccagaagaatccacaaacccttcaaaagaagctacaggctgcattctactctgtgagacaggtgaaaaactgtgaatcctcagagtaagagggggagagactgcttcctaggtacacatcttcactggggaatctgaaaatccagaccacaggagaaggccttaactctatccagggcttgaactgatttagggagtggtaagaaatataaaagtagaagcagcagcaggaagtcccttgcaggcattcacaatctccagcatggactgagggaagccattccttattgtatctcacaggggaccttggggaagtcagacaactagctcaggtgaggtcacaggttgaacgaaatgcccaaatgaatttcttgatataacctcgagtggggatgaactcccttgaccagaacccgggaggcaagcaggaagtgtgctgcagacaggagttcagaagctgggtgcctggccttggacagggacaaaaaaggacatggcctgaaagcattgctatttctgtgggaaaagcttatggcctggggcagggctgagttctgtgcacagactgcctggatctaaatccagtgctatgagtggaacactgcatgtgtgagacccaccttgtgccaactgcatgggagctagatgaggcttactgccacctgctactctccactcccttgtcaaactcttctgtgaggcagaggcagttatactcacctctggatcattaccccagtgacctaagaaccaccctctgactctcacagggcaaaacaaacaaacaaaaaaacagttgcaaaaaaaaaaaaatacctaggaatatacttaaccaaggaggttaaagctctctacaaggagaactacaaaacagtgctggacaaaaccatagatgacacaaaccaatgaaaacacatcccatgttcatggattggaagaatcaatattgtgaaaatgatcatagtgcaaagcaatctacagatttaacgcaatgcctatgaaaataccttcatcatttttcacacaactgggaaaagcaattctaaaattcatatggaaccaaaacagagcctgtgtagtcaaagcaataccaagcaaaaagaaaaaatttggaggcatcacattaccggacttcaaattacattacaaggctacaattaccaaaacagcatggtactggtataaaagtaggcatttagatgaatggaacagaaaggaggacccagaaataaagccaaatacttacagccaactgatctttgacaaagcatacaaaaacataaattggggaaagacaccctattcaataaatggtgctgggaaaactggacagtcacatgtagaaaaatgaaactgcatccccatctctcaccttgtacaaaaatcaaaggcttaaatctaagacagaaaccataacaattttataagataaccttggaaaaactcttttggacattggcctaggcaaagaattcgtgaccaagaccacaaaagcaaatgcaacaaaaccaaaaataaatcagtggaacttaattaaactaaaaagcttctgcacaacaaaataataataataataatagccgacttaacagacaacctacagagtgggggaaaatatttgcaaactatgcatctgacaaagggctagtatccagaatctacaaggaactcaaacaactcagcaaggaaaaaaaacaaacaaacaattagttccatcaaaaagtgggcaaagggcatgaacagataattctcaaaagaagatacacaaacagccacgaaacatatgaaaaaatgctcaacatcactaatcatcagggatatgcaaattaaaaccacaatgagataccatcttgtttctacaagaatggccataattaaaaagtcaaaaaacaatagatgtatgttgtggatgtattgaaaagtgaatgctcatacactgctatgaaaattaacataacctctgtggaaaacgataaggatattccttagcgaactaaaagtaaatctaccattccatccagcaatctcactactaggtatccacccaaaggaaaagtgattatatgaaaaagacacatgcacatgcatgcttatagtagcacaattcacaattgtaaaggtacggaaccaacctaactgcccattgaccaatgagtggataaagaaaatgtggcatatatacacaatggaatactactcagtcataaaaaggaatgaaataatgtcttttgccgcaacttggatggagctggaggccattattctaagtgaagtaactcaagaatagaaaaccaaataccatatattttcacctataagtgggagctaagctgtgaggacacaaatacatacagagtgatataatgagctttggagactcggagagcaaggttgggagccgggtaagggagaaaagactgcatattggggacagtatacactgcatgggtgatgggtgcactaaaacctcagaattcaccactatagaaatcatccatgtaaccaaaccacttatatcccaaatgctattgaaataaaaggaagtaaagaagagacagatctgcacattaacaatatatctttgggagcttttctttttctaaaaatatgagttttggaaaattagttcgtttttatttttaattggcaaattttaattatatatgtttatggggtgcaatgtgatattatgatatatgtatacaacgtggaatgattaagtcaatttaataaacatacccgtcatctcatatactcatcatttttgtggtgagaatatttgaaatttgctctcttagcaattttgagaaatttattattattaactgtagtcaccatgcatgcaatagatctcaaaacttattccttctaacggaaacttgtaccctttgaccaatgtctttccattctttcttcctcccttctctggtaaccaccattctcttcttggtttctatgatttctgtgttaattatttcagatctcacagttaattaaggttatgtgctgtttgtctctttgtgcctggctcatttcacttagcataatgtcctttaggttcttgcagattgccacaaatgaaagaattttcttctgttttaaggctgactagcattccattttgtatatatacaccacacggaaaatgagttttgaattacaaaagcaatgatgagaacagtttcttcttgcactcaatgaggcatcacagatagacaagggttattcttgacattcctgctatcccacctaatatcctccctttctccaagggggcctgtagagatacttatttgtcatctatctgtctgtctgtttacatctatctacatatctttctatcatcgatctcttcttatattccttatattttttgtcctatggtatttacatatatggacatttgggaacatgtttttttccactcaatactgtgtctgacagatattttttctgagtgctgaatagcattccatgttttatttggcccatccctttgttgaagacacttgcgtaaacatttccaatcattggaggtatggccaatttgcattccagagtctctgtactgatttagcttctggtctgcattgtgtgacaggactagtgatcctttttttctccttttgtgtagctgtatactattccattgtgtggatgtttatctaaacatctccccatccatgtatatttggcttgtttcatccttttgctaaattaaacttgtgcaatcggcatgtgtgtacagtgagcattgctcatatgtataaacatcactgcaggacaaattcccaaaagtgcaattgttgaaccaaagaccatttgcattctacagttgtaataatgattgcaaatccatctctatattaggtgagtttgatggcactagctttcccacaaatttgccaatagtattattgtattattaaatttaaattttttgtccatcttcatatttcatcttttaatgagcattttcttaaataagagtgagaaagaacatcctttgcccaagttgataagccatttattttctttctatgggagtggtcatctgatattttctgctgtttttctttgggttcttttttcttatttacttataagaatgtgtatcacaattaatgttttttttttctgtttttttgttgcaaaagattgccttttgacttttttggggggtgcttttggttaatttttatgaagttacatttgttcgtattttcttttgtaccacactacccagctatttcccagagttttgtggggcttcctttggcagatgggaagtttccacttattcacatgcccgtctctgacctttttagtcttttgaatgcatccgtttttatggcattgccagactattttttcttactgtgacttttcttttcttttttctttttttgagatggagtctagctttgtcgcccaggctggagtgcagtggtgcgatctcagcttactgaaacctcctgcctctctggttcaagctattctcctgcctcagcctcccgagtaactgggactacaggcaccctccaccacgcctggctaattcttgttttaggtagagatgaggtttcaccacattggtcaggctggtctcaaactcttgacctcaagtgatccacccacctcggcctcccaatactctgactttctaatgggttttaatatctggcagagtggctttttttgttgttaaatcaacccctgcaaacatttattgtgtgataaagtgtatgttttatttggattgagggaaatttataatgaaatacagagatttcatgtttctttttaagtttaatccaggtattttatattattatgactagtatcttttcttttattatcttttcatttgatggttatttctatatggtaaaactaatgatttatgcatataaattctatgcccagtgaacatagtatatgctaaagatggtatctgtatcaagagaaaaaatatagataattaagtaaaagctcttggggcaactggaaagccttctggaaaaaaggcaactgaaccttgttctcatatcttatgacaagataatgttcagattaatcatttttttctaaaagagtcctaaaagctctagaaggaaccatgagaaaattatttcatagcgccagagtagggataaccttattttgacgtaagtcccaggggctatgaaaaagtgataaactgttaaatgagagaaaagatacacgccagccacggtggttcatgactgtaatcccagtactttgtgaggccaaggtgggcagatcacttgagatcaggagttcaagaccagccttgccaaattggggaaactccatctctactaaaaataaaaaaaaaaattagctggctgttgtggtgaatgcctgtagtcccagctacttgggaggctgaggcagtagaatcacttgaaccagggaggtggaggttgcagtgagacaagattgtgtcactgcactccagcctgagcaacagagactccattccctccccccatcaaaaaagatacagaatagtgtctacagtagatggtgtgctcctatataattttttaagatgcttaaaatcagcccagaaagcatacattaaaaaaaataataacctggcaacgtgtggggagaagtaaatggcattgggccataggagtgaattatgttttatagttttcaaattctgaaccagataattgtagacggtatgaaaattttaaatagccactgcaaaagaagaaagattaagcagagaattcagctcctttgcttgatcttaaatgtttataaacgttttccagtggggcctctagtgttttctaagtataaaatcactatctgccaaaatgatacatttactaccacatttcaaattgcctgactctcgtgtttttttggctgcataaatgtcttcttttgagaagtgtctgttcatgtccttcgcccactttttgatggagttgtttttttcttgtaaatttgtttgacttcattgtagattctggatattagccctctgtcagatgagtaggttgcgaaaattttctcccattttgtacgttgcctgttcactctgatggtagtttcttttgctgtgcagaagctctttagtttaattagatcccatttgtcaattttggcttttgttgccattgcttttggtgttttagacatgaagtccttgcccatgtctatgtcttgaatggtaatgcctcggttttcttctagggtttttatggttttaggtctaacgtttaagtctttattccatcttgaattaatttttgtataaggtgtaaggaagggatctagtttcagctttctacatatggctagccagttttcccagcaccatttattaaacagggaatcctttccccattgcttgtttttctcaggtttgtcaaagatcagatagttgtagacatgtggcattaactctgagggctctgttctgttccattgatctagatctctgttttggtaccagtaccatgctgttttggttactgtagccttgtagtatagtttgaagtcaagtagcatgatgcctccagctttgttcttttggcttaggattgacttggcgatgcgggctcctttttggtgccatatgaactttaaagtagttttttccaattctgtgaagaaagtcattggtagcttgatggggatggcattgaatctataaattatcttgggcagtatggccattttcatgatattgattcttcctacccatgagcatggaatgttcttccctttctttgcaccctcttttatttcattgagcagtggtttgtagttctccttgaagaggtccttcacgtcccttgtaagttggattcctaggtattttcttctctttgaagcagttgtgaatgggagttcactcatgatttggctctctgtttgtctgttattggtgtataagaatgcttgtgatttttgtccattgattttgtatcctgagactttgctgaagttgcttatcagcttaaggagattttgggctgagacaatggggttttctagatatacaatcatgtcatctgcaaacagggacaatttgacgtcttcttttcctaattgaataacctttatttccttctcctgcctaattgccctggccagaacttccaacactttatgcagccaaaaaacacatgaaaaaatgctcaccatcactggccatcaaagaaatgcaaatcaaaaccacaatgagataccatctcacaccagttagaatggcaatcattaaaaagtcaggaaacaacaggtgctggacaggatgtggagaaataggaacacttttacactgttggtgggactgtaaactagttcaaccatggtggaagtcagtgtggcgattcctcagggatctagaactagaaataccatttgacccagccatcccattactgggtatatacccaaaggactataaatcatgcggctataaagacacatgcacatgtatgtttattgcggcactattcacaacagcaaagacttggaaccaacccaaatgtccaacaatgatagactggattaagaaaatgtggcacatatacaccatggaatactatgcagccataaaaaatgatgagttcatgtcccttgtagggacatggatgaaattggaaatcatcattctcagtaaactatcgcaaagacaaaaaaaccaaacaccgcatgttctcactcataggtgggaattgaacaatgagaacacatggacacaggaaggggaacatcacactctggggactgttgtggggtggggggagggggaagggatagcattaggagatataactaatgctaaatgatgagttaatgggtgcagcacaccagcatggcacatgtatacatatgtaactaacctgcacattgtgcacatgtaccctaaaagtataataataataaaaaaaaaaaaacaaattgcatgactctccttttttcccttgcctaattgcacttgctggtatctctagcatcacgctaaataagagcaaaacattggatctgggtattttgtttgttattcatttgcatttgagtttgctttcttgccatagacaatatttatttttatgtgagtttgttaattttttaccgctggcttctgggtgttttcctcagagtatttatttttatctatttggctaaattttctctggtacttttctaattctctgcttctctaattgttttctgctttttaaaattctcaaatgtttgatccccgtggagtttattttgtgatagggagaaaaggtctcatttgcaaatagaaaaggtggagagttgtgtatttgttcccttgataatgactggggctggggtgtttccttagggacgacctggcccagctgcccttcctgaccatgtgcgtgaaggagagcctgaggttacatcccccagctcccttcatctcccgatgctgcacccaggacattgttctcccagatggccgagtcatccccaaaggtgcccacagcctcagggggagaagcctcccgggtaggaagatggttccctcaggggatccttgtcctgactgcccctttctctcccacaggcattacctgcctcatcgatattataggggtccatcacaacccaactgtgtggccggatcctgaggtgctgccttccccattcaccaccaccacccccatcctctacttttgtgtgtgtgtgtgtgaattccaaggttcctagtggagggggcagggttttgatgaggaaaatccaacatcacctcaccccaaaacacacacaagtgtctctccaaggctgctggacataggaaatcccactggcaaaccttctttgtctcacctgcaggtctacgaccccttccgctttgacccagagaacagcaaggggaggtcacctctggcttttattcctttctccgcagggcccaggtaagagcgccctgtgtctgaggcagggatgggatgatgggtgcgggagttaaaaaaagggggacgttgcagatggtcccagttccagctctccttccctccattccttcacagtttatgggaaaacgtccatagaatggggatgagtaggtcctagaggggtccgcggagtgctcaaaatccccttctccatctgctggtctgagctgggagctggagtcaggcccagtctccgggacatacaagcccacatgggagtcccaggcacgcttagtctttctctctctctctcaggctgagctgggtgcagttgggggtcccaggccaggttcctgggttgatgggacccaaatgcgggtcttgggcacagtcacagtccccactcccgcctgcaggaactgcatcgggcaggcgttcgccatggcggagatgaaagtggtcctggcgttgatgctgctgcacttccggttcctgccagaccacactgagccccgcaggaagctggaattgatcatgcgcgccgagggcgggctttggctgcgggtggagcccctgaatgtaagcttgcagtgactttctgacccatccacctgtttttttgcagattgtcatgaataaaacggtgctgtcacctctgcctgggcctcactgacagcctgcagggggctcttggggactgggaggcttcagggaaggggcctaacctgggtgggttaggcgggatgttttccctgaaaccaagaacctgactgcctctttggctgagcatagggcctccatgcttatagcagggtctctcagagcccaagtatggactttatcctgtggacaatgtggagccatgggaggtttttgagcaggagagggaccaggattaagaacggatttaagaggtacgactgaggctaagtgagaagcaaccataggggcagatcctttcttttggtctgggagtgtcccaagaccgaggtccctggccagttcagaacacaaggatagaagggtgcagcttataccctggcaggctctcaggagttctgtttcctttcttgctaatgtcccaccctatgtctcccccttccagttgatcgcttttgtgacccctttccctaacttcaggcagctcctatttttcctcttttgagccctctgactctgcccaggctgcttgtccatcagctgctatctgaatcctccccctactctcttctgctatgtgccaggcactctcacaagtgtcaggggttgggcacgtcttcaccctttcacctctagattcctccttcattcccatcactgacccatcttggggtggggtgcagtcaggaacatcctgtttgacccttgagattcaaagacagatgactggaaacagaacaccatcccaaaggtatgggatctggagccagactgttgggctgaagtctcatctttgctgtgtgacttgagtaagttaattcccctctatgcacttcagtttcctcaaacatataatgtgggcaacaacactacctaactcagggttgtcctgaggacaaaatgtggagaactcagaacttgttgcctggtgcatattggatgcttaataaatgtggccattattacctcctctctgagaaagtctggctaataaaccatgttgcctttcaagatagtttttttctaccacgactttaaagactgtcttggaacttacaggcaaaaattgtaatatttgtgctccttgaataatctcttgccttttagagggctgtgcatttaggaggcaattttttctaagactggttgcgggcacctgaaagtgcaaggtggtaggagaaggaaagaagcctcagttaatgttttaaaatgatgtcctgccacaaacattgacctctgttcatagcctaaggaattctgcaccgctgcaccctgcagacttgtcaaatcttctctccagctcatattcctcccttgttacactcagtcaccttgtccttgattcttatctccaaatacattatattttcttgtttagggccattgtacttccttggaactcttgtgaaagatcagttgcctatacttaacgtgggtctattttctgggatttgtattctggtccattgacctatttgtcttttactaataccacaacatcttgattactgtaactttacagtaagtcttgaagtgggatattgtcattcctcaaacaatattccacttcttcaacagtgtgttgactattctaggtcttttgtctctccatgtgcattttagagttagtttgttgatatccattaaaaaagccttcttaaatttttactgggactgcattgaatctacataattacttgggaagaactgacatcctgagaatattttctgccttataagaaatgctcaaggaagtcctgcatctggaagtgaaaataggataactaccatcatgacaacatacaaaagtataaaattatctggcagaaactggaaaaaacttcacagtgtgaacctttacacactattttgtcttccaagtggaagaagcatactaacaatgccaccaatccaccatctcaggaaaaaaattaataaactgtcttttctgtaatccccttttcaatgggggtgaggtgttatctcactgtggttttgatttacgttttttgagaaccaaaagcaaacaggagtagctatatttatatcaggtaaaatagactttaagttaaaatctgtaaaaagagacaaagatgtttattatataataataaagggatcaattcaactagaggaaataattgcaaatgttgtaaatatttacaatattatttacacccaatagtagagtacccagatatcgaaagcacacattattagatctaaagagagacatatactgtgatacaataatcactggggacttcagcaacccactgtcagcattggacagttcatctagactagcagtctccatcttttttggcaccagggacgagtttcacggaagacgattttcccatggacgaaggtaggggatggttttgggatgattcaagcacattacacttatcattagatcctcataaggagtgtgtaaactagacgcctcatgtttggagttcacagtagggttcacattcctatgagaattgaatgctgctgctgatctgcatccgatcagcagggcaagaggcggagctcacctttgcttgcttgcccaccactcacctcctgctgtgcagcctggttcctaacatgcatcggattggtattctatacatacatatattaattaatatatattataatatgtctttcctttttttggtgatcttttcagtgtctttcatcagtgttttatagttttccttgcagagatcttttgcctacttatttaaattaatttctatgcaatatatattactaagaaatagtataatacatatgtgtatatatattatatatatataacttagaaataaatttaacttactcagttaaatttatttctaagtggctgggcgctgtgtctcatgcctgtaatcccagcactttgggaggctgagccagttggatgacctgaggtcaggagttcaagaccagcctgaccaacatggtgaaaccctgtctctactaaaaatacaaaaattagctgggcgtggtggtgtgtgcctgtaatctaaactgcttaggaggctgaggcaggagaatcgcttgaacccgggaggcgaagatttcagtgagccgagatcgcaccattgtacttcagcctgggctagaaaagtgaaattccatctcaaaaaaaaatatttctaagtaatacagattactaagaaatagtatagtgtatatacatgacttaaaaataaaaataactaagcagatgaaagagctctgcaaggaaaactataaaatactgacaaaagaaactgaagaggtcacaaaaaaaaatagaaagacattccatgttggaaggaacattattccaacattagttggaggaactaatattgtgaaaatgactcagctaccaagaacattctacagatttaatgcaatctctgccaaaataccagtgacattctctagagaaatagaaaaaaacagattctaaaatttatatgatatcatagaacactacacagagttgaagcaatcctgagtgaaaagaagaaatctggaagaatcacactatctgacttcaaattatactacaaagctatagtaatcagaacagtatgatactggcataaagagagaccaatggaaaaagaccaatggaacagaacatagaacccagaaataaatccatgaatttacacccagctgaatttcaacaaagttgccaagaatattcaatggggaaaggacaatctcttcaataaatgatggtgaaagaactgaatgtgtacatgcagaaaatgaaaccagatgcttatctcttaccatattcaaaaatcaaaccaaaatggataaaagacttaaatgcaagacctgaaactatgaattactcgaagaaaacattggggaaatgcttaaggaaactgatacgggcaagaagttttttgataagaactcaacagcataggcaacaaaggtaaaatggtgaaatgggattaaatccaacaaaaaagcttcttcagagcaaagaaatcaatcaacaaagtgaagagacaacctacagaatgagaagaaaaatttgcacgttttcagtctgacaaaggattggtaatcagaccatatgaggaactcagacaactaatagcaaaggaaacccaaaaataattcgagtaaaaatgggcaaatgatctgaatagacattcctcaaaagaagacataccaataggtatatgaagagttgctcaacattactaaccatctgggaaatgggaatcaaaaccacagtgagataacatctcacccccattgaaatggggattatagaaaagacagtttatttatttttttcctgagatggtggattggagggattgttagcatgcttctcccacttggaagacaacatagtgtgtaaagattcacactgtgaagttttttccaagaagtgacacaggaacttaacaggaaaactgaaagaaaccaccctttgaaagaagcatcaggctgcagcctacaccacgagccaggtggacaactgtaagtccccagagtgtgagagagggtaaagtgcctccaggatatacagtcccaccggggaacctggtaatccaggccacagggaaggtcttaatccttccttgtggcaggccaactgggtggctgggtcttaatccttctgagtactggagctgacttagtaagtggtgggagtatatgagaagtggcatcagggcaggcattcccagtctctggcattcccagtctccagcaggacaaagggaagccattcctgatcctacctcacaggggacctcatggacgtctgccagctaacacaggtggtggtcacaggttgagagaaactcccaactgagattcacaatataatctcaagtagggataactcccccgtggtcagaccaagaggcaagtgggaagtgagctgcagcaaccagcacaggagcttggtgttcctgcttaatgggcaaacctggagaggtgtggcctgaaagctgcagatactggctcagcattggacttttgtgtccctgcttaatgggcaaacctggagaggtgtggcctgaaagctgcagatactggctcctcagggaaggcgtatggcctggggcacatttgaattctgagcacagactgcctggaacctagctagctgctgctagtggaacactgtgggtgcaagacctgtcttgccaagagtgtaggagctgggtgtggcttattgccacctgctactccccattccccatacagactcttctgtgaagcagaggcagctgtgctcctccctggacattattcctgcaaccagagaaccactctctgatccccagtggggctactgcttttgtccagaggtggagagccagagtgcggacttgcctgattgagctctcacttggctttgcccctccacctgccctgatatattaatacgtagggcagaaatttttgggagccctatggcccccccgcccggcccgccactgcctgagacgcgagagtacctcctctgggtaacataagacagacacaaattccactgctaccaccacagctggtgttattttgcaagcgccacctcctggctgtgggccaattgacagagtccattatagtatctgcttgcaagcacaataacagccagcaggaaggagaaaacttgtgcatgacctcagctatcactattgcctgcatccatctggttaatcaggaagttctgagtctgtccacatgaccagtttgttagtaccacagctggcatttgagaaagccaacacactaaggctacttataactgagcaatctcacagaatctacatcactccccttcttcccccatcagagctggggctggtaccactgctgggggttttgaggatccgttacttgattggccccttgcagatattctccagcaccagcataaattgtggcagccccactgggtggctagaccaagaggagccgcagccttcatagtagtctggctctctgagactcctacttctagggggaaggggagtgcaccgtatcaatggagcacaccatgggacaaaagattccagatggtagaccttgagtcccactttccgcatatgagaagttgcttttctttttctttttttttttttttgagacagactttcgctctgtcccccaggctggagtgcagtggcgcaatctcggctcactgcacctgggttcaggcaattctcctgcctcagcttgctgagtagctggggttacaggcgcctgccaccgtgcccagctaacttcttgtatttttagtagagatgaggatttgccatcttggccggctagttttcaactcgtgatccactcgcctcagcctcccaaagtgttgggattacaggcttgagccgctgtgcctggcaagaagtttctttcagcagaggcataggtgcagtgctgggttcagtggcggaaatgtctgcagatctacttcaacagtcaggcacttctggggatcaatgaagggtcttagagaaggggactttttcttccccttgtccactactgcagacacagctgcagcttctcccatgacagcttggcatggctacacatgtagacattcattctctctggaatagttcagagtgactgcattctataggaggagcactctccaggttcaggcttgcatgagtggcagagccccagtccctctctacagggaatatcagcattcctgcaaatgaaaagaggtgcctatctgatctgactagtcagatcactgggtcaggagtgtatctgggaggtgggtaggtttcctgctgtcctggcaggggagctgaggaggctccctcccttccccttgaaaagacctccatgtgtttccctgagagctcccccaaccacatctgtcaaggatggcacctttgccccccactgggaactgcattgaccaaactgctttaaccacagctggtttttattcatggatacctcccttgagtggcctaaagcctgaactgttcatccaggtaaaaaaaaaaaaggttggggggatataaataaataaataaatgcatactactggggaatgagataagcttcaagagacctctgcccttccaacaccaacagaaacagtgaacctgccctcacactgagcacattgctactacaactagcatctgagaaagccaccatacaaagactccgtataaccaaggaactcatacagagtctgcacccacgaaagcacccagagccataggttacaataaactctaaacatcaaagtcacatcctcaaagggaaaaaagatctaagaaacatcacaattaatcaaaaataagttcaaaaataattagaagaagcagtctaaccaggtgagtggaaatcagaaaaataattctggcaatatgacaaaacagggttctataacaaccattagctctccagcaatagatccaaaccaagaagaaatctttgaaataccagataaagaattcaaaagattaattattaagttactcaaggagatacaagggagaactgaaaaccagcataaataaatttaaaaattaattcaggatataaataaaacttttctaaagaaatagctattttaaagaaaaatcaatcagaaattctagaaatgaaagacacatttagagacttacaaaatgcaggggaaagttttgaaagtaggcttgaccaagtcgaagaaagaatttcagagctcaaagacaaggctttgagttaaaccaattagacaaaaataaagaaaaaagaactaacttttttctttcttttttttaaaaaaagaaaagaaatggaaagtgtacccaagaaatacaagattatctataatggccaaatataagtatcactgatgttcctgaggaagaagataaacagaaagtttggaaaacttagtttagggaataactgaggaaaactttcctggtcttgttagagatttagatatctaaatataataggctcaaagaactcctggggaattatttgcaaaaaggacatgaccaaggcacatagtcattaggatatctaaagacaacatcataggaagaatgctaagagcagtgaggaaaagcatcaggtacctataaaggaaaacctatcagactaacaagacttctcagcagagactttatgagccagaaggaattagggtcctatcattagctaccttgtacagaaaaaactgtcagccaggaattttgtatccaacaaaactaagtaaaaacagaaggagaaataacatctttttcagacaagaaatgctaagggaatttgtcctaatagaccagtcctacaccagctaaaacctgttttgctaaactacatttatgcacaacgagcacagagataaactaaaccaaaaaaaagtatgaatgaaaccactgggatccttctatccccaccaccaatgattgctaattactaattgctaagaggatttctttttttttttctattaccaaaatatccatttgggtttattcaaattttttttttatttttttatttattttattttattattattatagttttagggtacatgtgcacaatgtgcaggttagttacatatgtatacatgtgccatgctggtctgctgcacccattaattcgtcatttagcattaggtatatctcctaaagctatccctccccactccccccaccccacaacagtccccagagtgtgatgttccccttcctgtgtccatgtgttctcattgttcaattcccacctatgagtgagaatatgcggtgtttggttttttgttcttgcgatagtttactgagaatgatgatttccaatttcatccaagtccctacaaaggacatgaactcatcattttttatggctgcatagtattccgtggtgtatatgtgccacattttcttaatccagtctatcattgttggacatttgggttggttccaagtctttgctgttgtggatagtgccgcaataaacatatgtgtgcatgtgtctttatagccgcatgatttacagtcctttgggtatatacccagtaatgggatggctgggtcaaatggtatttctagttctagatccctgaggaatagccacactgacttccaccatggttgaactagtttacagtcccaccaacagtgtaaaagtgtcctatttctccacatcctctccagcacctgttgtttcctgactttttaatgattgccattctaactggtgtgagatggtatctcattgtggttttgatttgcatttctctgatggccagtgatgatgagcattttttcatgtgttttttggcgcataaatgtcttcttttgagaagtgtctgtttatatcctttgcccactttttgatggggttgtttgtttttttcttgtaaatttgtttgagttcattgtagattctggatattagccctctgtcagatgagtaggttgcgaaaattttctcccattttgtaggttgcctgttcactctgatggtagtttcctttgctgtgcagaagctctttagtttaattagatcccatttgtcaattttggcttttgttgccattgcttttggtgttttagacatgaagtccttgcccatgcctatgtcctgaatgataatgcctaagtttacttctagggcttttatggttttaggtctaacgtttaggtctttagtccatcttgaattaatttttgtataaggtgtaaggaagggatccagtttcagctctctacatatggctagccagttttcccagcaccatttattaaatagggaatcctttccccattgcttgtttttctcaggtttgtcaaagatcagatagttgtagataaatggcattatttctgagggctctgttctgttctattgatctagatctctcttttggtagcagtaccatgctgttttggttactgtagccttgtagtatagtttgaagtcaagtagcgtgatgcctccagctttgttcttttggcttaggattgacttggcgatgcgggctcttttttggtgccatatgaactttaaagtagttttttccaattctgtgaaggaagtcattggtagcttgatggggatggcactgaatctataaattaccttgggcagtgtggccattttcacgatattgattcttcctacctatgagcatggaatgttcttccatttctttgtatcttcttttatttcattgagcagtggtttgtagttctccttgaagaggtccttctatctgatctttgacaacatgacaaaaacaagaaatggggaaaggattccctatttaataaatggtgctgggaaaactggctagccatatgtagaaagctgaaactggatcccttccttacaccttacacaaaaattaattcaagatggactaaagacttaaatgttagacctaaaaccataaaaaccctagaagaaaacctaggcaataccattcaggacataggcatgggcaaggacttcatgtccaaaacaccaaaagcaatggcaacaaaagacaaaattgacaaatgggatctaattaaactaaagagcttctgcacagcaaaagaaactaccatcagagtgaacaggcaacctacaacatgggagaaaactttcgcaacctactcatctgacaaagggctaatatccagaatctacaatgaactcaaccaaatttacaagaaaaaaacaaacaaccccatcaaaaagtgggcgaaggacatgaacagacacttctcaaaagaagacatttatggagccaaaaaacacatgaaaaaatgctcaccatcactggccatcagagaaatgcaaatcaaaaccacaatgagataccatctcacaccagttagaatggcaatcattaaaaagtcaggaaacaacaggtgctggacaggatgtggagaaataggaacacttttacattgttggtgggactgtaaactagttcaaccattgtggaagtcagtgtggcgattcctcagggatctagaactagaaataccatttgacccagccatcccattactgggtatatacccaaatgactataaatcatgctgctataaagacacatgcacacgtatgtttattgcggcattattcacaatagcaaagacttggaaccaacccaaatatccaacaatgatagactggattaagaaaatgtggcacatatacaccatggaatactatgcagccataaaaaatgatgagttcatgtcctttgtagggacatggatgaaattggaaatcatcattctcagtaaactatcacaagaacaaaaaaccaaacaccgcatattctcactcataggtgggaattgaataatgagatcacatggacacaggaaagggaatatcacactctggggactgtggtggggtggggggaggggggagggatagcattgggagatatacctaatgctagatgacgagttagtgggtgcagcgcactagcataaacaataagagaagaagagaggaataaaagatatacaaaacaactagcaaacaatgaataaaatgacagaagaaggttcttacctataataactttgaatgtaaacagattaaatcccccacttcaaatatatagactggctgaatggattttttaaatgacccaactatgtacttcctacaagaaattcactttacctatccagaaacatacagactgaaagtgaagggatggaaaaagacattttacccaagtggaaaccaaaagcaaataggagtggctatgtttatatcagataaaaataaaacagacaagggataaattcagcaagagcatataacaatagtaactctatatgctcccaacactggaacacctaaatatagaaaataaatatttttaaatctaaaaggagagatagactccaatacaataataattgtggacttcaataagccactctcaacattggacaggtcatctagacagaaagtcaacaaagatacattgtatttaaatttaatttcactttagaccaaatagacttaatagacattgacagaatggtttgtgcaacagctgcagaatacactttttttccattagcacatgtagcccacacattgggctacaaaggaagtctcaagaaatttaaatgtactgatatcagagatcgagaccatcctggctaacacacagtgaaaccccgtctctactaaaaatacaaaaaaattagccaggtgtggtggcaggtgtctgtagtcccagccacttgggaggctgaggcaggagaatggcctgaactgaggagtcagagcttgcagtgagccaagattgagccactgtactccagcctgggtgacagagagagactccgtcccaaaaaaaaaaaagtactgatatcacgttaagtatactttctgctggcaaggaaataaacctagaaatctgtaacaaaaataactttcaaaattgtacaaatacatgaaagttaacaacatgctcccaaacaactaatgaataaataaaatattaggaagtacatttaaaatttgttggattaaattaaagtataagcacaatatatcaaaagctatgagatacagcaaaagcagtattaagaaggaagtgtatagtaataaacacctacatcaaaaaagtagaaagatttcaaataaacaatctaataatgcacctcaaagaactagaagagcaaaagcaaaccaaactcaaaattagtagaaaaaaatgaagtaataaagattagaacaaaaataaatgaaattgaaagtaaaaaataaaatacaaaagatcaataaaacaaagagttgggtttagctagaccaagtgagaacaaaacatttagctagaccaagtgagaacaaaaagactcaaataaatgaaatcaggaatgaaaaaggaggagacacaacagaaaatctaaacaggctaattacaagtaatgaaatataatcagtaataaaaactctctcatcaaagaaaagcccaggacctgatggctttaaagatgaattctaccaaacattaaaaaaaaaaagactcaataccaattcttctcaaactattccaaacatcaaagaagaaggaattcttcttaactcattctatgaagccggcattacccttataccaaaaccagaatgggatgcaagaagaaaagaaaaccacagaccagcatctctggtcaatagaggtgccaaaattctcagttacatactagcaaactaaatccatcagcacgctacaaagataatttactatgatcaattgagctttatcccagggatgaaggatgttttgatacattcaaataaaaaatgacataacatcatatttattgaagagcaacagagtgaatagcaaaaatcatatgatcatctcaataaatgtaggtaaagcatttgataacattcaaaatttcttcatgataaaaagcactcaacaaagtaagtatagaaaaagcatacataacaaaataaaggataggcatgacaaatccacagccactatcacacaaaatgggcactgaaagttttcctctaagaacgggaacaagagaagtatgtccagttccaccacttttattgaacatagtgctggaagtcttagccacagagatcaggcaagagaaagaaaagagtgggcaaggatgtcaaattttccctgtttgaagatgacataatatgtgcatagaaaaccctaagtgctccaccaaaagtctcttagaactagtaaaccaattcaggaaagcagcaggattccaaatcaacctacaaaatcactagtgtttccatacacaaatgatgagctagcagaaaaagaaagaaaccaatgccatttacattaggtagatatgtatatgtgtttatatatatgtgtgtgtgtgtgtgtgtgtgtgtgtgtatatataaaatttcttaataaatttaaccaagtagttgaaagatctctgcaagaaatactataaaacactgatgaacgaaatggaaaaggtcaccaaaaaatggaacatcatctcctgttcatgaattggaagaaataatattgtgaaaatgactctactactaaaagcaatatatagagagaatgcaattcctatgaaaataccaatgagatttttcacaaaatttcaaaaaattctaaaatttatgtggaatcacagaagactccaaatagcaaaatccgtcctgaggaaaaagaacttagacggagatattacactaccaacttcaaattatactacaatgctgtagtaaccaaaaacttatagtactggtataaaaagagatgcatagatcaatggaacagaacagagaatccagaaatacattcatgaatttagagccaactaatttttgacaaaggtgcaaagaccattcagttagaaaaaaacagtttcttcaataagtcgtgctgaaaaaactggatcttcatatttagaagaatgaaactagacccctaactctcaccctattcaaaaatcaaatcatgatggatgtattagtcagggttctctagagggacagaactaataggatagatgtgtgaaccccatttctggtgccaaaatctgtattagtcagtgttctttagagggacagtactagtaggatagatgtatgcataaaggggagtttattaaggattattgactcacacgatctcaaggtgaggtcccacagtaggccatctgaaagctgaggagcaaggaagccagcccgagtcccagagctgaagaacttggagtttgatattcaagggcaggaaggatccagcaatggagaaagatgtaggctgggaggctaagccagtctagtctgttcacatttttctgcctgcttttattctggctgcactgacagctgattagattgtgcccacccagattgagggtgggtctgcctttcccagtccactgactcaaatgttaatctcctttgacaacaccctcacagacacacccaggaacaatactttgcatccttcaatccagtcaagttgacactcaatattaacaatcacaatagattacagacttaaatgcaagacatgacactttgaactagtagaagaaaatatttgggaaacacttcagaacattggtctgggcaaagattttttgggtaagacctcaaaagcacaggcaacaaaaacaaatagacaaatgtgatcatatgaatctaaaaagcttctgcacaagaaagaaacaaatcaacaaagtgaagagacaacctacagaatgagaaaaaatatttgcaaattatccatctgacaagggattagtaactggaatatataaagaactttactcaatagcaaaaaaaaaaaaaaaaaaaaaacaaaaaaaaaaaaaccaaaatcattctattaaaaaaattaggcaaactatctgaatagacatttctcaaaagaggagatacaaatggcaaatagatacattaaaaaatgctcaacatcactaatcatccaggaaatgcaagtcaaaaccatggtaagatatcatctcactgctgctaacatgtgtaattctttttatacattgttggattcgatttgatattttgttgaggattttgcatctaggtttgtgagcaatattaatctgtataattttttgtttcttaatttcttcttttttttcttctttctcttttctttgatttcttgtaatgtctctgtctgtatgtggcattagggtaccgctggcctcataaaatgagttacggaatattccccctgcttctgtctttcaaaagacacagaagaaaattggtataatttcttccttaaatgtttggtaggattcatcagtgagccaactggggtcttggctttctgttttggaaggttattaatgattgtttaatagatataggcctatttggattatctactagcactttccttttcttcctttctttccccttctcatatcttttggatagatggaaggtgaatgatggtatataaatgtgattcaaaattatgtagctgataaaaattgtaacattgatagagaaatataggccctatatgcattatttaaatacctatataataagcataaaacatgtttatgcagtaagtacaaagattaaaggacaatatgaaaagtgtagttaggtgaatcttacaagttatttagagaatgtggaaggctagttaaacagagtgacatacagaaaagaagactagtattaaatcagtggcaatatccttctgtgttcggccactcttgtgttcctataaagaaatacctggctggtgtatatgtgccatattttcttaatccagtctatcattgttggacatttgggttggttccaagtctttgctattgtgaataatgccgcaataaacatacgtgtgcatgtgtctttatagcagcatgatttatagtcatttgggtatatacccagtaatgggatggctgggtcaaatggtatttctagttctagatccctgaggaatcgccacactgacttccacaatggttgaactagtttacagtcccaccaacagtgtaaaagtgttcctatttctccacatcctctccagcacctgttgtttcctgactttttaatgattgccattctaactggtgtgagatgatatctcatagtggttttgacttgcatttctctgatggccagtgatgatgagcattttttcatgtgttttttggctccataaatgtcttcttttgagaagtgtctgttcatgtccttcgcccactttttgatggggttgtttgtttttttcttgtaaatttgtttgagttcattgtagattctggatattagccctttgtcagatgtgtaggttgcgaaaattttctcccatgttgtaggttgcctgttcactctgatggtagtttcttttgctgtgcagaagctctttagtttaattagatcccatttgtcaattttgtcttttgttgccattgcttttggtgttttggacatgaagtccttgcccacgcctatgtcctgaatggtaatgcctaggttttcttcgaaaccatcattctcagtaaactatcgcaagaagaaaaaaccaaacaccgcatattctcactcataggtgggaattgaacaatgagatcacatggacacaggaaggggaatatcacactctggggactgtggtggggtcgggggaggggggagggatagcattgggagatatacctaatgctagatgacacgttagtgggtgcagcgcaccagcatggcacatgtatacatatgtaactaacctgcacaatgtgcacatgtaccctaaaacttaaagtataatttaaaaaaaaaaaaagagaattgtccaagtgagaaagacaaggagagaatataaacattaaactaatgctgaggttggtgcacaaaaaaaaaaaaaaaaaaaaaaaaaaaaaaaaaaaaaaaagaaataactggctgggtatggtggctcatgcctgtaatcccagcattttgagaggccaaggcgggagaataggttgaggtctggagtttaagaccagcctgggcaacaaagcaagactgtatctttaaaaagaaaacaaacaaacaaacaaaaaggaaatacctgagacaggataatttataaagaaaagaggtttaattgaatcatgactctgtaggctgtacgggaaacatagtggcatctggttctgaggagccctcggggagctttgactcatgttagaaggcaaagcaggagcaggcacatcacatggcataagcaggagctagagagcaggggcaggtgcaacacacttttaaatgaccagatcttgtaagaactcactaacacgaaggctgcaccaagccatgagggatctgcccccatgatccaaacacctcccaccaggcaccacatgtagcactggggattacaattcaacatgagatttgggcagggacacagacccaaaccatatcaacctctaatgccagtagaaccactgactagcttcaggatctcaagaaaggattttaaagctcaaatagtcccagcactgtaataattacaggagaaaatgtaactacaatgtttggaagtagcgtctactcaataattgtgattctctgttcttgtccaatcctatgtttaatataaaaactcaactaaaggtaagtaaaagcactggggaatgaccttgccatgtggtattaaggagaagattctcaagcacaactgcctcagttgaaattaccaaatctgcatatagaaggaagatgtgagattttttattcaaagttaactagaaacccagcatgaggcagatggctgggagcagtccagggagtgtccaagatctgacacagaaaatcatgttcggaggggaggcttgttgctcattcccttttgtgtccagctgcctgggttcccttctccaccgttttatttgataataagctatctggagaacttgctgagcccagtgctgagccaagaagagaaatatgtgagctttgaaggtgcagtttcatttcgaggaatagagaatatctattcaaagttggggcagttcagagcagagtgagctgcaaactgttgtgcaggtatggggctggaaggcttcatacaacctcatagtcctgggacccaaacttttattcagaccatggaagcaggtgtgacaagagttgggcaaggcagacctttaattcaccctgataggctggagtgtgggcttatggcatttctcctttgacccaattaacctccactcccaatgtatctctgtgcagaaggctaagctaggtgtgtcagacattgtaaatcctcaacataaattataatttaacctagaatacagagactatgtagcaggaggagaggaaatgtggagatattaatctcttctcccttatcagaaaggaacctagcgtaagaaatttcatgcttaataggccaaagagtaaatcagaaaactccatgggtgatggtatgctcatggtggtggtggtggtggtggggaattctttgccctgtgacctcccttggattaatttgtccccagcacaatgggaaaaaacatttaatcctcggagttttaaaaatttatttatttattttttgcctgagagtgactctgatcctgtttctgacggtcatgttcgtcagcattgtagtgagtaagtcactggccttgtagcttctggagtgatgggagtgatccaagatccccagttcccatgtcacaaatgaggatcccacacatctggggcagcgatggaaaaggaggcatggctggagggttagggtaggctaattgctgctgggatgggagaggatgcagagggagctgtgtccctcctctctatccccagctttggaggaaccacgtgtgctttgtcagctgaagttggagcaacattcaatggtgagtgccctcttacaaacagctcaatgtgaacataatgagaacaccagggtctgctggaggcagagtggcctggtggtaagaactcaggctctggggtcaggcagagctggttcaagtcctggctctgcatcttctaagatgcacatctcttggttagagccttaacctcaccaaacctcagttgcaccatgttcacagtatcccacctctgaggctgctgttggcagtaatgagatgatgtggacagtctcaagaggtggcacatggtcacctctaggaggaagggcatcaggtgtgtgtagaatgtagtgtgggcttggggcaggaagtgagggagtggtgagagatgaagagaggtgaggagaacttctagaattgaaggtagctactcttgttacaaaagcagctgacgggctgtattagggatctctagagggacagaactaataggatagatgtatgtataaaggagagtttattaagggatattaactcacacaattataaagtcccacaataggccgtctgcaagcttaggaccaaagaagccagacctagtcccaaagctgaagaacttggagtccgatgttcaagggcaggaagcatccagcatgggagaaagatgtaggctgggaggctaagccagtctaatctctccacattcttctgtctgcgttttattctggccactctgacagctggttagatggtgcccacctggattgagggtgggtcttcctctcccagtccactgactcaaatgttaatctcctttggcaacaccctcacagacacaaccaggaccaatactttgcatccttcaatccaatcaagttgacactcagtattaactgtcacaaaggcccacagagctggaccccatcccagacgctgactgcatggccctctcctacctctgaggttgtcttgaccacctcaccctcaaaacccctagagtcagccaccgcagtgcagctgagctcactgggggtgcttctggcattctgagtcaggggatagcgggcctgatgtcaggggtgaggagagctggtcctgggggcagtgtgctgcagtgggagctggacaaatcccctgatccttgggggctgaaacaggagctggaaggagcctgtgtcaaaacatggacctgggagggtttccaagtttagagaagcctggagcccgcttgaggactggggatcaggcatttgacctcctccaccacccagtagcctctgagacactgacatagctgcgggaagagctaagtagcaataatgagcataatttggagactcaggagacaccatcctagggacccaggtcgtcctcaccggcccctgacagctccttgcttgggtctcccagtgacctaggaacaggctgatgtgaagtgcaacccagacttcatcctgtgccaagtattctgggaagtgagaggagggtgcaggggtcatagagggtctgcctcattcagcaccagggacagcgatcgaccccggactccttggcctctgtggctgcagggacactggctcaggtgcatcccatacactcctgcagttcagagtccaaggcgtgagcaccttgcagggtcccacagagtgggggcttgggaggaaagatgacaccatggactggagcagagcatgagttgatgaggacaggaccacagctaggatatatagcaaatgtccagtccagaaaccatggaaccagagttaaggaagaagcattgtgctgaaggaaggcaaatgtactcaagaatcccccagaaggatggagtgaagttctggtaaagggaatggaaatcaaggaaaactcaaagacagaagggagccagaatatgggtgccattgaatgtcctgctgaggaattaggactaaatcttctagacagtgtttctgccagtgtgccctttgggatgctagacacctcagataatatatattcagaggactctggatatcactaagcttggcaaaatgacacattgtccattatcctcctaaaaattcacaattattataacatattaaaagtactatgactccctgcaataaagaacttcctgtttcatattgcttgatccataatttagacacacacacagacacacacacttgcaatttaaaaaaaaacagtaggcatgacaataggagaaatgacagccagtttggtttatgccaaaattagacccttgaggcagttgagaaattgtcttgttggaaaacctctccaagctccagaaaggggaatttacaaggtctcaagtattctcaaagcccaaaaagagtttcatgtgaaagttgaagctgagccatctttccacttgtaaatgtccttcaggtaccatctcctgaggtcagtgcaataatagtcaccatctttagttggagtgatgaaattctgcctaagaaaaagatatagtcaagagatatgtgggaccatagctaagaccaggggttgggtcgtcttctaaaaagaacaagacacagtggaccccacagacaggggccattgtcaatgtcacagttgaatgtactggctgaatgctctggcttgacatccatcagaaccattattaaggcgtatgtgatcattcaactcagacacatatgacactcaagcaccttgtctgaaaatggagaaaacaatgacattcgcctcaaaggctcagtgaagaaataagggcacagtgtagtgcctagctgagtgtgggataagtggtaattaagaatattattaaatggtattgataaaaaggtaaggagtttggctctacccagtataaatggttaggtgaatcaactagtccactgacatatatggagtcctgctgagtgtcaactcaagttccaggcactatggactcaaaggtgagtcagatcaagcccttgcccctggaagattgctcatgtgtggggtgatgcacctgtgatctgacagcacagtccagagttgcatcctgaaatgaaagcaggtgctgttaacattagcctcccaattggcagatggaggtgcagagagatcaattcactttaccaaagccacacagccaggaagtggatgagccaggatttgaaccttagtctgtctgagatgagtcagtgctgtgaagcaaggagctatccaggctatgctacaagtctccccttaatcattaatctgtgtttaagaaactgaagagaaacaaacaattcgcaatggtgatcagctggtctctgtttaaagaagaaaacaagcccctggagcattcaaccaaagtgatgtcatggggtctccaaaccaggcaattagtaaaatttatctgaacctgccacctccagccctgctctaaagctctcagtgcacatcgttcaaagcccccaggtatcttttctggaggacacagcagagaagaacatggttagagccttgattggtattaaagatcccaatgggacaactgtctgcacaactcgccaaactccactgcataacaatccccaggaagccaattctaagttttgatagtgaacaagccatgggattttcactaacacctggtgactcattaaaagttgacacacaatttccatctccacttcattttttttcttttttttttttttgcaaatgaaagggtctctaaggatcagctacagagctgcagggaggttaggtttgaatgcatagctcagggattaagtggagacagaaacacggctcatcttactctggggaaatggtcccagagagttttccatttagcctcaggtccaaacttaggtgtctgattagcagcaagagacataggtaggcattggaagtggctctttcttccccaagacactatagtcccagagctccacatagccaaatgttacagaaagcaccacagcatcttggacatcagaaccaaagtatgcaaagtacttggtgccaagagtggcccctgtgagcattttgtgctgcccgatgggatggagggtaaggtctccagagctccgaggtgggccaggcttctgcttcctccatcctaatacttaccacactctccttattatataaatgacttgttcaatacctactatctttctctactcaacgttccccccaagaagataaggccacactggatttgcccaaccttgtgttctcactgcttggcacctaatagatgctcaataaataatcgcagagaaaacaaacaaatgactctctcattgcaaccccattccatgtctgtgagttgcaaaacccttctaaaatgtggatggctattctccagttaatctgaaattcattttgtagatgtagttgacatcatttgaacccacctgcccttatgtgtgtatcccctgtgtcaactcaggtctgatggattatggggaaaggtcctttggatgcaaacctctgcctgtcttttaggctccttgagccactcctcactcctagctgcccaaggccccttccatattggccttcttcggttccttggatgagcagtcattttcccaccctaagtcctttgcacatgcccttccctctgcttggtgcacaacctttcctctccctctgcagaatgactcaaatgaagtgctacctcctccgtgaagttctctcctatcagcctgtcctgctttctgaggattcatttgcctactcctgtagccactaccatcccttccttatgctcctcctgctcttgtctgaaattcagttattcatcatctaccttctctcctccactgtaaagtccacaagaacaggcactaagtctgcactggccattgcagtgtccacagctcctggctcagtgatgagctccaatgctctggatacatctgttaagtgtgtggtagctgaggctgaacttcctctgagctggagataagagttatctcatgcacagtctttaggggttgaggctgatcactctcatcatcttaagcagccagtgtggctctttctatttctccctgttaccaaagagcagatcaagcatgaggttacctgtttctactaatatttattgtcaggcagtgcttatctcagatggaggagacctcttgagcaagaagttgaccaagacattgaagagcccttcaacccaactcagccttccgatctttagtgaaaatgttatcctatgaatatttatgacacacctaatatgtgctagaatggtgactgcgacctggattccacctctaagagcttctgggcaaagaagggagacagaccagtgcatcagtcattcagataccgcaagataaatgcaatgaaaatgctgcaggctcctgcttacagcccttttcccttctctgaaactcattgaggtgaaaagatccaaaaaaggaattcatctagaataaattaccattaatactaaagagaacctgcgtggcttgtttcacttgacacaatgtcttctaggttcatccatgttgtcgtgaatgagaggatttccttctttttcaaggctgaatagtattccatgtgtatttattacctcatccatttatccgttgatgtacacttaggttgattccatctcttgacttttgtgaatagtgctgcaatgaatgtgggagtgaagatatctctttaatatactgatttcatatcctttgggtatatactatacccagattatatgatatgctggatattatatgctggattatatgataattccatttttaattttctgaggaacctctatactgttttttataatggctgtactcatctacaatcccacctacagtttacaagagttcccttttcttcacattcttgccaacattttttttatctttcatctttttgatgttggtcaaagaacataaaatttcagttagacaggaagaccaagagatctagtgcatcatgatgactataattaataacaatctattgtatatttgaaaattaacgagagtagattttgagtattgccatcacagaaaagaatgataactatgtgggataatgcacatgttaacagtcttgaatgaaccattccgcagtgtatacagatatccaaacgtcatgttgtacagcataaatacatacacattaaaaaaatgagtatctgccagatttcatgtatttgggatcagatggaagaaacagaggaatttgtcgcacagtccctgactcaagggcagaatgcagtgaaaggaagtagatggagaagatgtttctttttcttttctctttcttttctttctcttttctttttcttttcttcctcctttctttctttctttctttctttctttctttctttctttctttctttctttctttctttctttctttctttctttctttctctttctttcttttctttctttctttctttttttggagatacagtctcactctgccacccaggctggagtgcagtgatttgattgatcccgggtgaaagttgcgtggggggaacaccgtcgtgtaccatcctcggcgcgtctccgtgagtggtgctgcgagtgcgcatgtctgcacgcatctccaggtgtgcatggtgccaggacgctctgcaggtgcgtgtccacctccgcgtgcagggtctctgcctctgtgagggctcaggtctgaacattcttgctagtgcgcgcgcgtgccggttgggtgcacgcttggtgttggcgacagagcctgcagcacgtggggagaggtggcaggcggatgcaggtacatggacaggtgtgtgagggacacagtgggcacccgtgtctcagtctgtggaggcggaagccgcccatccctgagctttcctgaggagcctccccctctgctttcagacacagctggggtggggctcagcgctgtcctgggcgggagcaggaaggctgagccgggacagcgctgtgggttctgcctcccttagctccggactgaccctgggcaccccaggaccctctcccttcctgagcacaggctaggctgtgaacacagtgcagagacagggagaggtagaacaaggctgagggtggcccacggtccattttttttttttttttttgagatggagtttcgctctgtcacccaggctggtatgcagtggcgcaatctcggctcactgcaacctcctcctcccgggttcaagcaattctcctgtctcagtgattctcctgtgattctcagtgattctcctgcctcagcctcctgagtagctgggattacaggcatgtgtcgccacgcccagctaatttttgtatttttagtagagacagggtttcaccaggtcggccaggctggtctcgaactcctgacctcaggcgattcacctgcctcagcctcgcaaagtgctgggattacaggcgtgagccaccgtgcccggccccatggtgtactttttaaaaattgaaataaaattctcataatattgaattaaatagtataaagtgtacaatttagtggtgtttagtacattcacaaggttgtacaaccaccacctctatctagtttcagaatatttttgtccccacccttaaaaacccgtacccatgagcaatcactccccattcccccctcccagcccctgtcaaccaacacctgctttctgtctctatggattggcctgttctggacatttcatagcaatgggatcagaatatatgtgactcttttgtctggcttcttccactcaatatcgtgttttcaaggctcctcattttgcatgggtcatgatccgtgttgcatgggtcagtgctttattcctttttattttttataggtatatagtaggtgtgtatacttatggggtacatgagctgtttggacaaaggcatacgatgagtaataattacatcagggtaaatacaggatccatcacctcaaccatcacctcaagcatttgttgtttctttgtgttacaaacattccaattatatatatatatatatatataatttttttttgacagagtcttgctctgtcgcccaggctggagtgcagtggcatgatcttggctcactgcaacctctacctcccaggttcaagtgattctcctgcctcagcctcccgagtagctgggactacaggcacatgccaccacacccagctaatttttgtatttttagcagagacggagtttcactatgttggccaggatggtctcgatctcttgaccttgtgatctgcccgccttggcctcccaaaatgctgagattacaggcatgagccaccacacccggcctccaactatacttattatattaactaattatatttagctcttataaaatatacattaaattattgttgattgtaatccccctgttgtgatatcaaatactagatcttattcattctgtctaactatacttttttacgcattaatcatccccactcccccccagctatgtgcactacccttcccagcctctaataaacatccttctgctctctatgtccctgaaagcaattcttttaacttttggctaccacaaatgaatgagaacatgcaaagtctgtctttctgtgcctggcttatttcacttgacataatgacctccagttccattcattttgttgcaaaggactggatctcattccttttttgtgtctgagtaatactccattgtgtatatgtaccacattttctttaactaattctctgttgatggacacttaggtttcttccgaatctgggctattgtgaatagtgctgcagtaagcatgagtgaagaaatctcttcaatgtactaatttcctggctcacatctgtaatcccagcactttgggaggctgaagtgggtggatcacttgaggtcaggagtttgagaccagcctggccaaaatggtgaaacccctctctactaaaaatacaaaaattagctgggtgtggtggcaggcacctgtaatcccagctaagtgggagggtgatgcaggagaatctcttgaacctaggaggtggaggttgtagtgaggtgagaatatgctattgcactccagcctgggcaatacagtgagactgtctcaaaaataaaattatgattttctttctttagggtatatgcctagcagtgagattgctggattgtaaggtagttctattttagtttttgggaaacttccatactgttctccatagtggctgtactaatttacatcgccaccaacagtgtatgaggattcccttttctctgtgttctcacctggattctctatcttttggacaaagctatttattgtcttctatcttttagataaaagctgttttaactggcatgagctttcaaaaatttagattaaatttatttaacctgaaattatcctttaaatattttaaagtggacaatcagtggcatttagtacattaacatgttgtgcagctactacctctagttacaagacattgtcaccattccaaaaagaacttcatatccattcatcagtcattccccatcccacgctagccccattccctgacaaccacacatctgctttctttctcagtggatttaactattctggacatttcttataaatggaattatatactatgtggccttttgtgtctggcttccttcactcagcctcatgttctcaaagtgcatccacgctgttgcatgtatcactgattcaatctttgcgtggttgcataatatttcattgtgtggtcggaccacattttgtttatccattcattcattgatccagtttgcattgtaacataaacttttgtattttgcatctagcctgtttgcagactggcaagaaagagagtgggagaggagtcacagcctcctagtttagtttgttggggaacttccataaactaaataaagtagaagggctcctattggtgcagggaggagagctgccctggcagagaaattgggcagatctgactctgtggccactcagggaaggtgatgagagaagccatggctgatagcctaggtttttgctgttaggtttgggattggaggattggggttggggtcaaaaagaggaggagaccagcagagtcacgtagtggaagcatgctgggcccatagcctagaggtcagtggaccataaccattttctgctaagaagtttttgactgggcatggtggctcacacctataaatcccagcactttgggaagctgaggcaggctgatcacttgaactcagaagttcaagaccagcccgagcaacatggttaaaccccatctctactaaaaatacaaaaattagccaggtgtggtgatgcgggcctgtaatcccagctactcaggaggcggaggcaggagaattgcttgaacccaggaggcggaggttgcagtgagccgagatcatgccactgcattccagcagggacagagtgagactctgtctcaaagaaaaaaaaaaaaaaaagcggaattgtgatagagaaagagtaattcacacagagctggctctgcaggggactggagttttattattactcaaatcagtctccctgagcacttggggagcagagtttttaaggacaacttggtgggtggaggggaagccagtgagccagcagtgctgattggtcagagatgaaatcaaagctgtcttcttgcggagagtcagttcctgggtgggggccacaagatcagttgagccagtttatcgacctgggtggtgccagctgatccatcaagtgcaggatctgcaaaatatctcaagcactgatcttgggagcaatttagggagggtcagaatcttgtagcctccagctgcatgactcctaaaccataatttctaatcttgtggctaatgttagttctacaaaggcaatctaatccccagacaagaaggaggtctgctttgggaaagggctgttatcgtccttgttccaaactataaactataaactataaactaaatttcccccaaagttagttcaccctatgtcctggaatgaacaaggacagcttggaggttagaagcaagatggagttggttaagttagatctctttcgctgtctcagtcataattttgcaaaggtggtttcaattttccaggggagcaatgaggctcagagaggggaagcaacctgccctgcatctcacagctagaaagcagtggtgccgagaattaaacagagtctggacgtttccatgacatagggaagagatgacttccagctgaaggtggcaatcagggagcagcttgctcataaaattcaggtaggatttggacccataaagatagggaaaagcatgaaaagaccagcatgaacaaaggcagaaaagcaaggtgtaggtggtggtgcatggatctaataatcgtgatggcaataacaatagcagaataattattactatcaacatttataatttattaaattcttactttgtgtcaggacctgcacaaagcacttaaggtgagtgatcttatttaaacctcaatacattattattaatgcctttctgcagatggagtaaccatggcttggacagatgaaggaggcgctctcagatgtcctcccaggcaggaatcactagacacccccatgctcctaaccactgggtcttctttcctctcttccccaactaggggtggccgtcatgctggggctaaaccacacctccatgtctgaattcatcctcgtcggcttctctgccttcccccacctccaactgatgctcttcctgctgttcctgctgatgtacctgttcacgctgctgggcaacctgctcatcatggccaccgtctggagcgagcgcagcctccacacgcccatgtacctcttcctgtgcgtcctctcagtctccgagatcctctacaccgtggccatcatcccgcgcatgctggccgacctgctgtccacccagcgctccatcgccttcctggcctgtgccagtcagatgttcttctccttcagcttcggcttcacccactccttcctgctcaccgtcatgggctacgaccgctacgtggccatctgccaccccctgcgctacaacgtgctcatgagcccacggggctgcgcctgcctggtgggctgctcctgggctggtggctcggtcatggggatggtggtgacctcggccattttccaactgactttctgtggatcccatgagatccagcattttttatgtcatgtgccacctctgttgaagttggcctgtggaaataatgtaccagctgtggccctgggcgtgggcttggtatgtatcatggcactgctgggctgttttctcctcatcctcctctcctatgccttcatcgtggccgacatcttgaagatcccttctgctgaaggtcggaacaaggccttctccacctgtgcctctcaccttattgtggtcattgtgcactatggctttgcctctgtcatctacctcaagcccaaaggtccccactctcaggagggtgacaccctgatggccaccacctacgcagtcctcacgcccttcctcagccccatcatcttcagcctcaggaacaaagaactgaaggttgccatgaagaggaccttcctcagcacactctattcctcaggcacctgagtagctggtgtggaagtgctgatagaatatgataggaggatgaccatcaccttgtctgcacagtgtggctagtaatgcttaccttgtaaggcaggtgtaaagatttctgtatatgacaacactcatcacatagtaggtgctcagtaaatgttaaaagcatgtttacttccacaactcttgatctgtatgtctttatctgagttttaatttttgagttatagtagctttattaagatgtaattcacctaccatacaatgtacccattagagcgcacatttctgtggtttttgcgtattcagagttatgcaaccatcatgacaatctggcttagagtattttagtcatccaaaaaagaaacccaaatcctagtgctttggaaggctgagtgggagaattgtttgatgtcaggaattcacgatcggtctggacaacatagtgagatgccatctacacacacacacaaacacatacacacacacaagttcttttttttttaatttattacactttaagttttagggtacatatgcactacgtacaggttagttacatacatatacatgtgccatgttggtgtgctgcacccattaacttgtcatttaacattaggtatatctcctaatgctatccctccccactccccctaccccacaacaggccccagtctgtgatgttccccttcctgacacacacaaaaattctgataattagctaaatggggtggcacattcctgtagccccagctactccagaggctgatgtgggaggattgcttgcatccaggagttcgaggctgcagtgagccatgatcaccactgaactctgacttgggcaacagagccaaaccttgtctcaaacaaacaaacaacccatactcattatcagtcactctctgtttcctccaaatctccatgccctccagccctagggagccactaatctttctgtctggttagagttgctttttctggacgtttcacatcaatggacaactgtaaatataattcttttattttcagatgaattgtttcactgagcataatgtttttgaagttctcctacattgtagcttgtatcagtacatcatcttttttttttttcaagacagagtctcaccctgtcacctaggctggagtgcagtggcatgatcttggctcactgcaaccttcgcatcccaggttcaagtgattctcttgcctcagccttccaaatagctgggattacagatgcctgccaccatgcctggctaatttttgtatttcagtagagacggggtttcaccatgttggccaggctggtcttgaacacctgacctcaaacactccacccacctcggcctcctaaagtgctgggatttcaggcatgaaccaccgtgcccagccagtatatcattttgattgccaaataatattccattgtatggaaacactacattttatttacccatttgtcattgatggacatttcagtgtttctaatttttgctattttgagtaatactgctatgagtgatcagtacaagtgttgcaatatatgctttcatttccttgggatatatacctaggagtgaaattgctgggtcaagtggtatttctatgtttatttttttaggaacttccaagctgtttcctaaagtctatgcaccattttacattcccaccagcaatgctgcaggggtctaggtctctgcaacctcaccaatacttgttactgtctttttgatcacagccatcttcgtgggtgtgaagtggtatctcattgtggttttgatctgcatttccctagtgagtaaggatgttgaacatctcatcatgtgcttattggctatttagatatgttcttggagaaatagctattgagatactccacccattttccaattgggttgtttgtatttttgttgttaagttgtaagaatgctttatatttttagttaagactcttttatctgatctgtgattttcagttatttccttatagtttgtgggttgtgttttcatggtctttttggtgtctttctgtagcacaatagatttacattttgataacatcagtgtacctatttttttttgttgttgcttgtgcttttggtgtcacatctaaaaaaacattgtattgctttatctaaggtcatgaacatctacgttgcctcataagagttttgtagttttagctcttacatttgggtttttgatatattttgagtgtcaaactttgtgtatggtgtgaggtaggggcctaatcttagttttggctgggttcagtgtggttgaatgaatcctgtctgtgaacttccatcagtgacctatgtctgtgattatataagtttgtgaggatgaggaaataatcatcacacacacacatggccctaggcagacacatcattcatactgaattagtaaacacacttcattcccagctactaggttgcttcccatgctgttgcacagcaatagtaaaataataatggtagccactgtatgagtgtctactgtatgttgagctgtatactatgtccagcacccttcatagatcatctcttcatttctaaaactgtgtaacaggtaaaaagacaagtgtgccagcaaaaattgcttattatttttaatttctcaaaggttttgagggagattgagttctagaaagagatttctctatacaagctgtggaaagtgggcatggtggctcatgcctgcaatcttagctacttgggaggcttaggtggaaggttaacttaagtccaggagtttgagaccagccttggcaacacagggaaaccccaattttacaaaaaaaaaaatacaaaatattagctgggcatgtttgcactagcctctagtcccagatactcaggaggctgaggcaggaggatcacttgagcccaggagattgaggctgcagtgagctgtgatcacattactgcaatccaacctgggtgacagaatgagaccctgtctcagaaaaaaaaaaaaaaaaaaaagactgcctcgagcctagtttgctatatactacttgtacttgctgacaaattggattgtgcatctaattttatggctttgtgaacagaacgtgcctagtccaggataagcatattgggttgtgtccttaatggggctcagaagtgagtgaagccttattgtcccaggaaagaatagtgatttcttgctctaacatattaaacatttccactgtggatctcctattgagctctgcaaggttttacacaacatcctcattttccagttgctcagagcaccattaggtctgttggattttgagaaataaaaataaaatcctaaggcccccaaccaactgaacagacaccctcttgaacataagaaccccagagaaatcttaaaaaccgtgttcccagctgtgatggaaggagaggttggctatccctcagtatggcccttccttatcaatctttaaccagaattctccatccctgtctcctttgagactggaatcttcccatcctttgcatgagctaaaatctccctgggcagagaggtagcagtgagccctgtgtgctggaggaagaggtggaggctgcaggttcctgaatgctccctgaggctcttcctggcctctccagacccagaggacagcctttccagcgtggtttcctgtagaggcccatgggaatgacctgctgggaaggtcactgcaggaataaagctcacagcaccagttcaaggaggccctgggtctggctcctacacttgcctgcaggtgtcctgtgaaaacacctaaaaagggtgttttttgtgccttttccttagagccacttcattgaaggcagccccaggtggaggtggaccaagaggaggagggtataagggcagagtcagagagctgtggatggagctgcccagcctagagttggggtgcagaactggggagacgaggaaaagagagagatctcaactttagttgacttcctggggccttctgtgtttgcccactcaagatgcctggttgtttagtgagcccaggcactcatatcagttctcaactggacgtgattctggccctcaggggtcaattggtcgtgcctggagacggtttggttgtcaggacttgtgtatgggggttggggggattttcctactagcatctaagagattgaggccaagcatgccactaaatgtcagacaatgcataggacagctcccagcacaaagaatgatccgtcccaaacctcactagtgctgagactgagaaacgctgttctaggtatattttgtcttcactgttgtgcccctgctaacctgggggcaaggctctgtgggagggcaggatgcactccagtgctgtgagatgtttgctcagcctgtatgtatgagccatctgcaatgataccagagtaggcagaattctgtccacttgtcagaggagatggggaagccgggccttgagagctgtggctgctccagtaagcaggaggtgggatgttggactgtaggggtgagacaggggcttgaggagagggggaaggttagatgagactcttggttggatcagacactgtgttgtgtcattgccagaaatcctaaggaccctgctggggtcagagaattagcctagaatggggtcagcaagtgacatttgtaacagaacaacacaaacaaaccagctcagaagaccaaaatcattatcagtcaatgacaatgacttttgcaaggtggactctcacagtgctctggttactcctgtttttcacttggggagagtagcctcgaagctgcaaagtcgtttctccaaagacacacagtgatggctggggtttccaccctgagtctgatgcctccacaacttgtaaacatttcaggaaattctctctggaagccagagtggagtgtgtgcagaggagaggagatgaggaggatggggcagtggcccaggagaggggatggagaggaagggagcagatggagaagtgcttagtaggagagagggcgcccagcaatgggagggatggggaaggaagatggctgatgctggagtatggtttctgggtagggcagcttcgtggtcagaagactttccttccgtgtcataagtgtggtcttttcatgtgggatacgtcatcctcactccagtaaagttcctcactgtccgggtgattctgtgttctccaagcgcctgactgactcctgctttggtcaggggatacttcagacaatatcctagtgagactgctagggggatgtaatgatgaatgggcccatccagaaagaaagatttcagaaactcttgtagcaatgtggctcacattattcataaaaatatttgtttcttttatggtagaattcaggtgcaaaggtttgagtccatgatattttcagtttgtggcttttgattaacattgatttgcgaaagatccttctcttatttcatttgtttcactttgtttccgttctttgacaggcattttcacacacttagtatgcactttttgatttgtatatgttcttgtaagaaacacattgctttctgtctgcacaaaatttaatgtgactattttaaaatggtaaattaatggacttaattttattagagcagttttaactttatagaaatattgatcagaaagtatagagagttctcacatacgcttcacccctgcatgtgggattgtctctcctattattgacatcttgcatttctgtatcacctgtgttacactcgatgaaccaatattgatgcattgttattaactaaatttcatagtttgtattaggttatgctctttgcattgtgtatatggattttgacaaatgacatgggttcattattactatatcattcagaatagttttatgtacatatattcttaatgtgtccacaagagttcattctgtttttttgtttttttcactcaatattattttaaaagttcatttatattactatgtgtgcatctaactcgtgacaaaagctctatatccttttgcctctatatccgttgtttgcctctatatacttttacctgccttctccccagttagggacaagcaggcttatccatcacccccactaaaataactgctgcaggaaacattcttttacatgtccccctataaacaggtttcagaagtcaagatagatatacagtagcaaatttgctggtacacagagcatgaatcccattaaaaattttaatttccaacattctacatgcccactaatagtatgtaagtatttccccttccccttcccctccttctccttctccttctgcttcttcttcttcctcttcctcttcctctgatggagtcttactctgtggcccaggctggagtgcagtggcggcatctcagctcactgaaacttccacctccaggggttcaagtgattgttatgccttagcttcccaagtagctgggattacagatgtgtacctccagcctggctgatttctgtctttttggtagagacagggttttgccatgttggcatagctggttttaaactcctggcctcatgtgatcctcctccctcggcctcccaaagtgctggggttataggcgtgagcctccgcgcccagcctatagtgcgtaaatatttctttctcctcatagcccaaccaatactggacattttataattttgggaattgcataggtatacagtgaaattccactctctctttcattttccccttccctccattcttttcctttttgttttctttttcttttttcttttttttcgagcatcctttcatctgcctgagtaattcctgtgcattatcttctcacatcttttgctcgtttttgcattaagatacctacttcttcttgatataactggttccttgtttgttctagatataactctcttgtcagtttttaagaaattccccacaccactggatgtgctcctgtcggttttagacaatgcaaataatttttccccatttcccatctgcctgttaacttcatcctggaaatcctttgttgaatggaaatcctcaatgttgatttttttaatgttttaaaaatcatcttaatgattgtgctttggaaattttgtttaggaagtctttcctcaagcctagatcacaaagttattctcctatactttcttctcttaaatttacaccttgatatttggtatttatttcttgaatgcatctggatcctcctttgtatgtagagtttggcagaaattcggattgacttgcttcataaaatgagcagttttctcactacaatgggtgaacaacctaccttctcctcttgatttgtgccagtacatttatcgtgtactatattaggttttgaataatgcagggttattttctgagatttccaatcgacttacccagacctaggtctgttccacgtttcataattttaaaaatgactatgactctattgtgtgtctcagcgcgtgggagggaacagctcttcccttgattccatatttatttatttatttatttatttattttagacagagtctcactctgtcacccaggcagcacactgcaacctccgcctcccaggttcaagcaattcttgtgcctcagcctcccaagtggctgggattacaagtgggccatcacacctggctaatttttgtatatttagtagagacgggctttcgccatgttgctccggctggtcttgaattcctgacctcaagtgttctgcccagctcggcctcccaaagttctgaaattacaggtgtgagccaccgtgcctggcctgatatttatttttctgaaggaattttcaaatagttttatcaaatttacagttgattcactggaattgtaaatataatacaatattatattattgagtattattaagtattgaggttataatttgaggatgaattgacaccattagcacatcaggccatcccagccaagactctatactgctccccatgtgttcagatcatcttctacatttttattagtatgtatttaaaattttttctttggagctatgtcatgtttttggttaattcctagatattttatagcagattttttcaaagtgtgacatgaggacctctgcagagtggtccctgaaatccttatttttcaaatttacatgtgagaatatattttcatcatatgcttcaatatattgccacagactgaatgaagaggcagatgaaaccatcaagctgtttcctgccaagctaggacatatgaggtattggctaaaatgtcaaacaaggccactcttctcatgaaatgcttttttcctaatgtgattatttgcctgaaaatgtttcccatattagcattcaatagacttactattgctctttagaaatttttttttgagacgaagtctcactctgttgcccaggctggagtgcggtggcatgatctcggctcactgcaatctccgcctcccgggttcaagtgattctctggctcagcctcccaagtggatgggattacaggcgcgtgcccccatgcccagctaatttttgtattttttgtagagacctggtttcaccatgttggccaggctggtctcaaactcctgacctcaagtgatccacaaacttcggcctcccaaggtgctgggattacaggcgtgagccaccgtgcctgggcatgcttttttaaatatactaataactaaatatttttaataattttcaattttcatttccaatatggtaaaaatggatagttctaaaccacataaacaaaagccctttagagtgcttagtaactttgaggtgtaaagggatcctgagcgatgtttctttatattaatagtttgtgttgctattgggactgttctctttctctgtattcagattatacttcttgaatgcttgttactggtgtgatactaggaggatcactggggtttttgccagctgaccttgccttctgcatcactgggctctgttgctgttctaatacatgatgtcatcattctttcatcttttctaggtagatgatcacgtctcttcccttccagtccttagataccttagataacttgtttctttcccttaccttataccatcactcacgaatttcagctccatgttaaagaacagcggaattagtgagtatccttggctttttcttgactctaaagtgatgcatggaaaagtttcttcttcagtgttgtatttgctaatttgtgctatatattctatatctagttaagaaagtctccttggattttgtgttgtgaagtgtttttttttaaatcataataggagtagggttttagagaatgtatttatgccttgattgaaataatcatgatttttctttttaaatcgattcctgtgataaattgtatgataggttttctgatgttaaccaatcttgtcatttatggaataaaccaatgccacttgatcatggtaaactatttttaatacaccattagatttgaataggttatgttttattctggaattttaaatctgcctggataggtgaagtaggcctataattgtctctttttctcggtgaagattcttgcctgattttagacaaagattgcattaacttgaggagatgtgtttgtcagatttcctaactcttttctatttttttgaagatcatgtgtaagattctaaccaactgtttttttttttaacagtttaatagtacttaccgcactttaataaaacccactggggcaaagattttagagagacgatctttgactaccgtttcaatttctttaaagcttatttgagcatatagcatccccttttttcttgcaccagttttggaattttatatttttctaagtacttgttcatttcatctacaatgtaaatttgttatttcttttactatttttattaatttaaaaatatcaattatctctgtaattatttcccatttgtaattttgggttctgttattggtaccttctccttgtttatcttattaattttttccaataacttgattttgattttattatgcatgatttttttcttgaggcagttttttgataaaggtattttgagctgtatatttccttcaaagtactattttaggttaaaatgttgacattcaatatttaaattatcatttaattctaaatattcctccattttatgatttactgttgaaactgtagattatttaattatatagttatcttccaaacacatgagatttgtaaagctatttcttccctattgatttttaatgttaattcattataatctatatcatattattatgctttggaattaaataaatttttatattctaatgaaatgtccatttttgtaaaagtcgctgagtggttgaaagagtgttaattttctttttggtgaagagtctaatatatataatagctaatgtctggatattattaattgctttgtaattaataattaataaattgcatttctgaactctgttaaaatttctaactataataatctatctgccaggtgtggtggctcacacctgtaatcccagcactttgggaggctgaggtgggcggatcacctgaggtcagaagtttgagaccagcctggccaacatggtgaaaccctgcctctactaaaaatacaaaaattagccaggcgtggtggcacgcgcctgtaatcccagctattagggaggctgaggcaggagaatcagttgaacctgggaaggggaggttgcagtgagccgagattgaaccattgcactccagcctgggtgacagagcaagactccgtctcaaaaaaaaaataatcaatctgccgtcgatttggctatttctatctatctcactgaagttgtattgattatttgttaatgaatattccaggatatatagttacatggatttatagtattgatgctgtttgctatgttcttttaatgggtataaatgttattctctgtcccttagtgtgtgtgcatgtgtgtgtgtgtgagatgtaaaaatcttggtatgcattgaaaaactaaacatttaccttcatagtcaaaataaccagataacacttacaaaaataattagctgagcatggtggctcatgtgtataatcccaccactttgggaggctgagacaggaagattgcttgaggccaggaattagagaccagtttgggcaacaaagcaaagccctgtctctacaaaaaaaaaaaaaaaatgtttaattagacaggtgaggtggcacacatctgtagtccagctatttaggagactgagaagaagcataacttgagcccaggagttccaggatgcagtgagtcatgatcctactactgcactgtaacctagggggcagagtgagaccttgtctctaaaaaattcacaattagatcaataataatgctttaatattactcatacgtaatcattcattcatactgtaatcaaaatgttctctattgccttaaaatacttacagctggttatgtagatcaagattcaactagtcccctatgttgcatccagttactatgtcctggaatctctcttatcctttcaatatacctctatcagtgaaaccagaccaattgttctgtggaattatccaccttctggatttttctgaaagctttctcattatataatttagcttgttcctccatcttctgtacaatgattattgtttttgactagtgggcatcttttcaatctggtacctgcaggcttttaatattatcccattacttagtgaaaatttcattttacactggtagaagatgtccaaggctttcttccatgtccagaccacagatcagccatgtgttaaggaactctacttccctgtagaggtgtattgtattagagaccttgcgatcattgtttccttaaattccacttttttattaaggttgcagcctcagctttcatttggtgcatattcttcagacatatatttacccatccttttatttttgaattttctattcagatttattagaatagtaaatgtgtaatttgaaataagatggcataaatgagtatcaataaatgagtattaaaataaatgtaaacgggttaaataagcaattaaaagacaaagactcttggggaacaaaaatttaaggctcaagatcaaaataaatgttttctagaactggcacattttcaggggaatctgaccctgatcatccatgcctgtctctaatggctccaagtattgaaacttttctttatgttagtcagtgttaatggaaacccaattagtagccaacatctgacttggtcatctaatatattgatctcgtttgatctttgtcacattgctgaatgttaagaactattattatttactccatttaacagatgaggaaagtgagacccagaaagttccaccagttgttgaatagcatagagctgttgggtttccatttggtctgtgctagagtctaagttttaaccactgtcacttaattttgtttctgatctcaccagatacagtatccatgcctggtcagaactacagaaccatatctgaatttatcctctctggcttctcagccttcccccagcagctcctgcctgtcttgttcctgctgtacctcctgatgttcctgttcacattgcttggcaaccttcttatcatggccacagtttggattgaacgcagactccacacacccatgtacctcttcttgtgtgccctctccatctctgagattctgttcactgttgccatcacccctcgcatgctggctgatctgctcttcacccatcgttccatcacctttgtggcttgtgccattcagatgttcttctccttcatgtttggcttcactcactccttccttctcatggtcatgggctatgatcactacgtgaccatctgccacccactgcattacaacatgctaatgagtccccgtggctgtgcccatcttgtggcctggacctgggctggtggctcggtcatggggatgatggtgacaatgatggtttttcacctcactttctgtgggtctaatgtgatccaccattttctctgtcatgtgctttccctcttgaagttggcctgtgggagcaagacatcatctgtcatcatgggtgtgatgctggtgtgtgtcacagccctgataggctgtttgttcctcatcatcctctcctttgtcttcattgtggctgccatcttgaggattccttctgctgagggccggcacaagactttctccacttgtgtatcccacctcactgtggtggtcatgcactatagttttgcctcccttatctacctcaaacccaagggcctccattctatgtacagtgatgccttgatggccaccacctatactgtcttcacccccttcctcagcccaatcattttcagtctaaggaacaaggagctgaagaatgccataaataaaaacttttgcagaaggttctgccctctaagctcctaatggccagtttggtggtgataaaatataatagaagggctggggataataatgtgtatctccataggactgttgtaagggttcaggtatgtgaaaatacctgaaaatatgtgttttgtacctactagctattgttttccccttcctttttgcttaggctcatgtgatcatttatgagccattgtaacgaactttatcccattatctgtgcctagaaatgtgttttctatctgtggataggtggagatcatcacgtggatgtgtctgggcatttatgcacatggttcttcttaaacagacaggcaaaaaagattttattttcccctagtgtaagaaaaagcaagaataacatcatagtcataaatgccaccaagcattgaagtttttctatgtatcctgtactgtgtccagtgttttacaaatattatccttttaattagaagaaatgaacaaaggaaaataaactatttgtctcagagaaactggtttctgtttttgttttgatggagtcttgctctgtcaccaggctggagtgcaatggcacaatcttggctcactgcaacctccccatcccgggttcaagtgattctcctgcctcagcctcgcgagtagctgggaccacaggcgcgtgccaccaggcccagctaatttttgtatttttagtagagatgggttttcaccatgttggccaggatggcctggatctcttgacctctttatctgctggccttggtctcccagagtgctgggattacaggcatgaaccattgcacccagccactgaaactggtttcttatttaaagttcctcactgtctttgggagacatataccctaagtgtgtgtgtggatattatgtcgaattgagtgaaggatatcagaatgcaaaagtggagagagagcaagaaggagagagagagagagagatacagagataggagaaagagagagagagaaagagagagagagaaagcaggtgtcaagtagtcaagtaaaaatagagttctttacattttttgatctgtacaagaaatgtaataactaagaatttggggcaaaatctgggaaagggaaaaagagagaaaaaaaggaggttggtaaaatagggctttaatatgtcctaataatagggctgtaatatgtcctaataagacaggcacgtgtctcatccaagcgtttttgacacagttgctctgcagtctcaatgggtcattctaggatatgtactcccttgtctccaatggatgcatcagttttctggttttctggttctggtcattggtttcaccagctgaggaatgaatattattttcacagtgcggctactcttctaatgctactcagagagtcctcacctgtgcttcctgctggtgctggaatgtgaaggtcaacattgaaagagatttcattctagaaaagcagagatcatggccttaaaaggtcaaaaggtgatatggttggaagaggttttattgtatgtttatgctataaaattccaaacaaagcaagcttttcttggcattatcctgcatactctgggcaagacttgcatatgtggttatcatcagtgaagcaccatagcaaccagtgagagagcctctgggaatatggtcacagatgataaagcgacatgagtgatgatggaaagggcattaagtaaacactatgcacgtgctacagaggtggaactttctatacaaataaatcagaaatttttccaagagccaaggtattgtgagtattaaccactttgctacctctttcttccgctttcttttgaatagttttagtatggtatatatttctccattcatttactttttaatttatatatgtctttatatttacagtgattttcttgttagaaaacactttatccgcagtttgggaggccgaggcagaagatcacgaggtcaggagattgagaccatcctggctaacatggtgaaaccccgtctctactaaaaacacacacaaaaatgagctgggcgtggtggcgggcacctgtagtcccagctactagggaggctgaggcaggagaatggcatgaacccgggaggtggagcttgcagtgagccgagattgcgccactgcactccagcctgggcaacagagcgagactctgtctaaaaaaaaaaaaaaaaagaaaaaaaagaaaacactttatccaggtcttattttttaatcctttctaatgatctctgtattttaattcatgcattaaaaatactgatgttcaaagtaatttatgatacactgatattaatataaaccaaatttgttacggttttttgtttgttgcttttgttctttatttctatttttgtctttcattctttttatgcctttggtgcttttaagtaagcattttatatacttccatgttctcttatttcttggcatatcaattctactttaaaaatatttttagtagttttcttagagttttgaaatatacatttataactaatccaaatccatttcaaataacattatatgatttcacaggtagtgcaagtatcttctaataataacacaattctgatgtcttctttctatcccgtttattattgttgtcactatatcatatattcataaaaatgtatataacatatgtataacatacacatgtgcacagatggtaaaatgctttgtttatcttattattttaaactgtaatctgttagatcaattaagaataagaaaaatgaatgcttttatttatctccatttattccttccctgatgctcttcctttctttaggtagacacagatttctgacctatataattttcattctctttgaagaacctccttaaacaattcttgcaaagcaagtctactgataacaaatgcttttaacttttatctgagtcagtctttatttctcctccacttttgaaggatactttcatagggtgcagaattctaggttggtgaatttttttctctcaacactttaaatatttcacttcattctcctctttcttgtatgggctgaagagaaattggatgtaattttaatctttactcctctataggtaaggctctcccttcagcttttataaggatttttttctttatatatatatttttaaaatttttaagttccaggatgcatgttccgggtgtgcagtttgtaacataggtcaacgtgtgtcatggtgattttccgcacctatcaacgcagcacctaggtattaagcccagcgtgcattaactatttttcctaacgctccctcactccccagcccaccccgtgacagaccccagtgtgtatttttctcctgccttgtccgtgtgttctcattgtatatttgattttctgtagtttgaaaataatatgcctacgtgtactttttctggcatttatcatactcggagtggtctgagcttctaggatctgagatttaatttctgatatcaatttggagaaattctcggtaattattgtttcaattttttcatttgtctttcttctcttgctggtatttccatgacacctatgttaacattttgtagttgtcccagttggatattctcttctgcttgtttccctccactcttttttctctttgcttttcaattttgcaggatcctatgatatatcctcaagctcagagattcttccctcagccatgtccagtctactagtaagcccatgaaaagtattcttcgtttcatcttcctcctacccctctccctcccctccccttcctcctccacgtcctcctctctttcttctccttctccctttcttctcctcctcctccttttcttctgattattttttaaaatagggacagagtctcactctatcacccagcctggactacagtggtgcaatcacagctcactgcagccttgaatttctgggctcgagcgatccactggccttagcctcccaagttgttgggattgcaggtgtgcaccaccgcatctgaacaatttttttttttttggtacagatggggtcctgatattttgacccagttggtctcaaactcctggacttaagcaatcctcccacctcaatctccccaggcactgagatgacaggtgtgggccaccagtccattccttatttctgttacaatcgatttgacttttagcatttcttttgtctctttcctagaattatcatctcagctgacattgcttatctgtgtttccttgctgtctattttgtctactagaacccttggcacattaatcatagttgttttaaattcccagtctgattattttgacatgcccaccttatctgggtctgtttgtgatgccttctctctctcttcaaacagtcttttagtatgccttgtaatttttttcttgatacccagacatgaagtacttgggtaaaagaactgttttaaataagcctttagcaatatggcagtaaggtatggggaggggaatcattctatagacctatgcttagatatcagcccccatcagcagatgtgctaatcaggatcccctgacaccacctcccttaggtggaacaggatgactagagctggcaagagttgggtattttctttttccagtgaaactgtaataaaactccagtaggttaggttctggttcaattgtttctcctcatttggagtctttcattgttctctcctgcctgattgctctggctaggtcttctagtactatgttcaatagcagtggtgagagtgggcatccttgtgtggttccacttcttaaagggaatgcttctagcttttgcccattcagtatgatgttggctgtgggtttgtcgtagatggttactattttgaagtatgttccttcaatgccaaatttgttgagggtttatgacatgaagggatgttgaattttattgaaagcccgttctgtgcctattgagatgtggtttttgttttaaattctgtttatcaactcatcatctaggttttaagccccacatgcattaggtatttgtccttatgctctccctcaccctttcccccacccaccaacaggccctggtgtgtgatgttcccctccctgtgtcaagccaccatggcacatgtatacctatgtaacaaatgtgcacgttcagcacatgtatcccagaacttaaagtaagaaaaaaagttctcatctttcttttcttatataaaagatagatacaatgatactggtgagaattaaataaatttatacatgtaaaacacctcacctagaacataacacccaaacacaggctacataaattaatgtttgtccataaaaaatgcataaaaaattccgtttatgtgctgaatcacatgtactgatttgcatatgttgaaaagaatgaagtcatgtcctttgcagcaacatggaggcagctggaggccatcgtcctaagcaaactaatgcgggaacagaaaaaccaaatgctacatgatcttactggtaagtgggagttaggcactgactacacatggacacaaagatagcaacaacacacactagaaactattcggtgggggagggagggagaggggcgtgggtggaaaaactacctatcagctactacgcttactacctgtgtgatggcaccatttgtacaccaaacgtcagcaacatgcaatttacccatgtaacaagcctgcacatgcacctcctgaatctaaaataaaagttgaaaagaggaaaattgttcctcctgagggtagatcttcataggaagaacagaatactctggcgtatttcaaaatgggtcattgttcctcctcccctaacagaagtatgaggggtcttttctcctgcttttacaatgaggacttgacagacctcttagaggtaaaaccaacaaaagtgtgggaaccccctccaataactgggtccccaggagttttgacctctcagatttgtctataccaagccttcagtaattcttcaattacagtaaacatttcccttctctgatattggttcctccagaggttgcaatggatggatttcttttacaataagttgtgattccctctacttgcctgttggtctttccaatttggggagctgcagtttgccctgtgacatcttttaccaatcaagactgctgagttttcagtttattcagctttttacttattgtcgggatccagcagcaactttcagcttcttacatgccagatcagaaactggaagtcaaatataagttcattttttatataactaccatatcaacttaagttttgtttataacttactaaaaagaacaagtgccttagtttgtcctgacatccaataaatgctctaatatcgggattacttaaagagcatttttctaatcagaatgcaaacaagaactacatgttaattcagttatgtcttttagggacttttattctataatcctcattctccttcaatttttgacatttgtttttgagatagtctagattattattttcttatagaaagtcatacaagctatattagcacgttgtttcatgacagcgtcatttcacacgttcgcagtagaatttaagagtggaaggagaagacagagatgctaacaagagaacttggacttatctctttctggagagaagtcagggaattgtcatgagatcacaaatcaagacagatgggctgggtgtggtagctcatgcctctagtcctagcatttcaggagtccaaggagggaggatcatttgagaccaggagttcaagactagcctttgcaatatagcaagatctcatctgtacaaaaattttttgaaaatttaattggaggtaatgaattccccttcacccccactatgaacatacccttacccctagagttttctgatttactctttggcccattgagcatgaattttctgatactgcatccccttccgataagggagaagaaattattactcccacctctcctctcctcctcctgcctggactctgtattctgggttaaactatgatttattttaaggatttataacgcctgacacatgtagctgagccttctgcacagagaaatattgggagtggaggctaattgggtcaaaggaaagagccttaaacctacactacagcctatcagggtgaatcagaggtctacattgccctactcttgtctcacctactgccacaatctaggtgaaggtttggaccatagaacgaggaacttgtgtggagacttttagccccatagatgccctcagaccagtctgcaggacactctgccctgacctgccccagctttgcacacatattctccagtccttgaaaggaaactgcccccttcaaagcttacaagtttctcctcctggctcagcacggggagcaagttctctagatagcttcttgttaaataaaatggtagggaagaaaacccaggcagctgagcatagaaggggatgagcaacaagcttcctctccaaacatgattttccgtccaaggtcatgagcactccctggtctgcttacatttaccttatgctagatttctggtcagcacaacagcatgcaaagcttcagcagcttccttctagatggagctgtggtggttcctgtttaggcagttgtgctcgagaatcttctcctccaggactactgggcaaggtccagtgcaaaggagttccccaacacttttatctactttcatttgaatttttaaattaaacattgaactcagcacaaagagaggcgaggatcatgattattgggtagattctacttccaaatattgtaattgcaattccttgtgtaattattatagcactagggctaccagagctttaaaatctgttctcaagattctgaaggtagtaagtggtttggctggcatttgacatatattttcaatgagtttaaaattagttttcttgcctgtataccactctgcctgactaaccttaaaataatctctttaaaatatctgtgatatttacctaactacatttttataatgtcattcaatactatacttattgcataaatattttacgtacttatcatgtaagtatacaaaatagcacatatagatcttatgtttctccatgaagtttttaattgtatcagctacataattttttaaatttttttattttaagttctgggatacatgtgcaggatgtgcaggtttgttacataggtatacatgtgccatggtgatttgctgcacctatcaatccatcatctaggttttaagccctgcatgcattaggtatttatcctaatgctctccttccccttccccaccaccccccggcaggccctcgtgtgtgatgttcccctccctgtatccatgtgttctcattgttcaactcccacttatgagtgagaacatgcggtgtttggttttctgttcctgtgttagtttgtatcaggtacataatgtttaatcatagttatatactatcattcattcacctttgatctacccaaaactatgagaaggggaaagaaaagaatgaaaggaaagtgcgatcaatctgaataggcctgtatcgattagagcaattgaattaataattaatatcatttaaaaacagaaagcctcagacccagactggttcactgatgatttctaccaaatatttaaggaagaaattcttaccaattttctgctttatcttttaaaagacagaagcaggggaaatatttcctaactcattttatgagaccatcattaccctaatagcaaacctagacaaagacattaccagcaaaaaaaaaaaaaaaaaaaagaaaagagaagaagaaaataaaagaaaaaaattaggaagaaagggagaggtaaaactatacagattaaaatctaccttggacatacatgcaaaattcccagcaaaatattagcaaattgaatccaacaatatataaaaataattatacattataaccaaatgggattcattgcaggtatgcaaggctggttcaatatttgaaaatcaaataatgtaaaccatcacattagcaagctaaagaagaaaaatcacatgattatatcaatagatgcaaaaaagcatgtgacgaaatcccacacccattcataattaaaaattatcagtaaggtggaagtggagagaatgccttcaacttagtaaagaatatcttcaaaaacctacagatagcatcatacttaatggaaagaaacgacaagctttcccactaaggttagaaaccagactagaatttcccctcttgtcactacttttcaatattgcactggaagtactaaatgcaataagacaagagaaagaaataaaaaatacttggattgggcaggaagagataaaactgtttttgtttgcaaatgggatgatggtctatgtaaaaaatctaaaagaaccaacaaaaaccctcctggaactaataagacattatagcaagtttgaaggatacaatgttagtatataaaagtcaaacactacatagcagcagtaaacgtgaaattggaaattaaaaatgcaatactattgacattagtatccccataaaatgcttacatataaattttaaaaatgtacaagatttatatgtggaaaatcgcaaatttctaatgaaagaaatcaaagaattgaatgtagacatattccatgttcctgggtagaaaaactcagtatctattttttatatcgtttttctcttttttattgatacataataattgtacgtatctgtgggttacatgtgatatggtgatataaatatacaaagtgtaatggttgaatctgggtaatgggatatccttcccctcaaacatctgttatttctttatgttgggaatatttcattattgtcttctatctattttgaaatatacagtaagttattgttaaccatagtcaccctactgcactattgaacacagaactgatttcttctatctaactgtatttttgcaatcattaaccaactgatcttcattcaacttcaacctttccaagcctctggtaaccattattctactctttatctcttgagatcaacttttttggttcccacatgagtgagaacatgtcatacttgtttttctgtgcctggcttatttcactttacataattatgtgcatttctatccattttgctgcaaaggagaggatttcattctttgtaatggctatagactattctgctgtgtatttgtacattttctttgtccattcatctcttgatggacacttagactgattccatatcttggctattgtgaatagttttgctgtaaatgtgggtggggaggtggaaatatctctttgatatattgatttccattctttttaatatataccaagcaatgggattgttgaatcatattgtagatgcatttttagggttttttttttttttttgaggaacctccatactgttctgcatagcgattgtactaatttacactcccactggcaggatatgagtgttcccttctttctgcttctctgacagcatccattattttttctatttttaaatacatttttttatttcaatggcttttggggtaaaagtggattttggttacaaggatgaattctacagcgatgaagtctgagattttagtgcacccatcacctgtatagcatacactgcatccaatatatagttttttgtccttcaccaccattcccctcttctgagtctccaatgcctgttataccactgtgtatacctttgcatacctatagtttagctctcacttataagtgaggtcatacagtattgggttttccatttctgagttacttcacttagaataatgacctccagctccattcaagtttcattcttttttatgtttgagtagtattctgtgggagtatctataccacatttcctttatccactcatcaattaatgagcacttaggatggttccacatctttgcaattgtgaattgtgttataataaacatgtgcatgtgtctttttggtatagtgacttcttttcctctgggtagatacccagtagtgggattgctgaatcaaatggtagatccaccttcagtttttaaagaaatcgccatactgctttccatagaggttgtaatttacagtcccaccagcagagtaggagcattcgcttttcgtgacatccacaccaacatctattgttttctggctttttaattatgcccattctggcgggggtaaggtggtattttattgtggttttaatttgcatttcactgatgattaatggtattgaatattttttcatgtgtttgttgccatttgtataccttcttttcagtaatgtctattcatgtcctttgcccccttttggatgggatatttttttcttgctgatttgtttgagttccttgtagactctggatattagtccttcatcagatgcatggtttgcaaatatattctctcccattctgtgagttttctgtttaccctgctgattatttcttctgctgtgtagcagctttttagtttaattaggacctatttatttatttttggttttgttgcatttgcctttggaatggtagtcataaattatttgcctaggccaaagtccagaagtgttttcctaggtcttcttctagaatttttatggtttcaggccttataattgtctttgatccattttcagttgattattttacatggttagagaaatgaatccagtttcatttttctacgtgtggttatccagttttcccagcacgatttattgaatagggtatcctttccccagtttaggtttttgtatgctttgtcaaagatcgggtggttctaagtatatggctttatttctggagtctcctttttgttccgttggtctgtatatccacttttataccggtaccatactgttttggttactatagccttgcaatataatgtaaagtcaggtaatatgatgccttcaggtttgttctttttctcaggacttttttggttgtttgggctctttttttcttctgtataaattttaggattgctttttctagttctgtgaaaaataatgatggcattttgatgggcattggattgatctatagatggctttggacagtgtggtcattttcacaatattgattcttccaatccatgagtgtggaatctatttccatttgtttgtgtcatctgtgatgttctccagcagtattttgtagtactctgcttctagagctctttcaccttcttggttaagtatatttctcaacattttattttttgcagctactataaaagggattatgtcattgatttgattatcagtttggtttttgttggtgtatcccagtgctactgatttgtgtacattgattttgtaacctgagattttgctaaaataacttatcaaatctaggagtcttttggtggagttcttagagttttctaggtatacgatcatatcatcagcaaacagtgatagtttgactttctattttataatttggatgttctttatttctttctcttgcctgattgctgtagctgggacttccagtactatgtttttgtttttctggtggttgtttgtttgtttagacagagtctcgctctgtcacccaggctggagtgcagtggtgcaatcttggctcactgcaacctccacctgccatgttcaagcctcagcctcctgagcagctcggactacaggagcacaccaccaagtccggctaatttttgtattttcagtagagatgagctttcaccatgttggccgggctgatctcgaactcctgacctcgagtgatctgcctgcctcagcctcccaaagtgctggaattacaggtgtgagccactgcgcctggcccccagtactttgtcaaatggaagtggtgaaagtgggcatccttgtttcagttcttaggaggaatgctttcaagtttaccccattcaggatggtgttgtctgtgggtttgtcacataaggcttttattattttgaggtatactccttctatgcctagtttgttgaagatttttatcataaagggatgctggattttatagaatgctttttctgtgtctgttgagatgattatatggtttttgcttttaattctgtttatgtggttaatgacatttattgacttgcatatgttgaacatccctgcatttcagggatgaaacccacgtgacaatggtatataatccttctgatgtgctgttggatttggttagctaatattttgttgaggatctttgcatctatgttcattaaggatattggtctgtagttttcttattttgttatgtcctttcctggttttgttatcagagtgacactgaattaataaaataagttagaaaatattccctctttattaatcttttggactagtttcagtaggattggtactaattcttttttgagtgtctggtagaatttgactgtgaattcatctggctttggggtttttagttgtttttggcaattcgttagttactgactcaatctcacggcttgttattggtttgtttgggatttctatttcttcctatttcaagctaggggagttttgtttccaggaatttacccatttcctctaacttttctagtttgtatgcatagaggagttcatattagttttgagtaatcttatatttctgtggtgtcagttgcaatgcctccatttttatttctaatcaagctaatttgaatcttctctcttcttttcttggttaatctagctaatgatctatcaattttatttatcttttcaaagaacaaactttttgtttcactaatcttttgtgtattttaattcaatttcatttagttctgctctgctttttgccatttcttttcttctgctagctttgggtttggtttgttcttgtttctctagtttcttcaggtgtgacctttaattgccaacttctgatctttcagactttttgatataggcatttagcatgataacccttcctcttagcactgttttgcagtatcccagaggtttggataacctgtgtcactattatcactcatttcaaagaatttttaaaattttcatcttgatttcattgttaactcaaacatcattcaggagcagattgtttaattttcgtgtatttgtatagctttgagagttccttgtggagttgatttctagtttcatttcactgtagtctgagaagatacttgatatgacttggatttttaaaaacttattgtggtttatcatatggtctatcttggagaatattccatgtgttgatgaaaaaatgtatattctgcagttcttgcatagaatattctgtgaatatctgttaagtcctttgttatggagtgcagtttaagtccagtgtttctttgctaactttctgccttgatgatctgtccatgagtgttaaaatcccccagtattattgtgctgctgtttatctcttttcgtagttccagtagtaattgttatatgaatctgggagttccatagtcaggtgcatatatatttagggttgtaatatctcctctttgaagatcaatcttgttgattcatcattttatcattatatagggtccttatttgtctttttttacattgttgctttaaagtctgttttatctgatataagaacaattactcttgcttgcttttggtttctatttgagtggaatatctttttcaatcccctttaccatgagtctttaagaatatttacatgttaggtaagtctcttgaagacagcagatgttcggtttgtaattttttttatccattctgaccatctatatattttaactggagtatttagatgatttacattcaacattaatactgagatgtgaggtactgttccagtcatcatgttgttacttggacactttgttttctttgttgcattattattttacaggccctgtgagtttcatgttttcaggaggttccattctggtgcacatcaaccttttgttgcaagatttagaaattgttttagcatctcttgtagggctggtctgttagagacaaattctcttagcattttctcatcagaaaaatactttatttctccttcatttttgaaacttagttttgttggatacaaaattcctggctgacagtttttttctgtaaaaggtggctaaagataggacctcaatccctttggcttgtaaggtttctgctgagaagtctgctgttagtctgataggttttcctttataggttaccggatgcttttgtctcactgcccttagcatttttttccttcatgttgactttagataccctgatgactatgtgccttggccatgtcctttttgcaaagaatttcccaggagttctttgagcttcttatatttagatgtctaaatctctagtgaggtcaggaaagttttcctcaattattccctcaaataagttttccaaatttttggctttctcttctccctcaggaacatcaatgattcttatacttggccattgtacataatcttatatttcttggataccctgtcgatttcttatagttcttttttctttatttttgtccagttgggttagctcaaaagccttgtctttaagctctgaaattctttcttctaattggtctagactactttaaaactttccactgcattttgtaagtctctaaatgtgtctttcatttccggaagttctgtttgatttttctttaacacatctctctctttagaaaatttttatttatatcttgaactaatttttaaatttctttatgttgattttcacttctctcttgtatcttcctgaataacttaataattagccttttgatttccttatctggtatttcaaagatttcaccttggtttggatctattgctggagagctaatggatgttatagaaccctgttttgtcatattgacagaattatttttctgatttcctctaatctggttaaactatttcttctaattatttttgaatttattttttattcaactgtgatttttcttatttcctttttctccttgaggatgtgactttaatgtttatagtttattttaacctatggctctgggtgctttcaggggtccaatgatgtgatctatcctcaagactcccagcagtgggtaacagcaccagctctgatgggggtggcagaggggtgacgtagattctgtgatattgtttggttataaataggcttaatttggctttctcaaatgccagttgtagtagtaatgaactggtcatgtggacagactgagaacctcctgattaaccaagttgatgcaggcaatggtgataaccgaggtcacacacaagttttctccttcctggttgctgttatgtgcctgcagaggttataatggactctgtcaattggcctacagccaggatgtgaagcttgcaaaagagcactagctgcagtggtagcagtgggatttgtgcttgtcttttgtaatctcgtttgtctatttcacctttgttgtctgtgctgttgagttcttatcaaaaaagttcttgcccatatcaatggcctgaagaatttccccaatgttttcttcaagtaattcatagcttcaggtcttgcatttaagtctttaatccattttgatttgatttttgaatacaataagagataagagttcagtttcattattctgcatatggacatccagttttctcaccaccatttactgaagagattgtcttttccccattgaatattcttggcaccactgatctttgacaaaggtacaaagaaaatgcaatggtcctgtacaagaaaatataatgtatttggagatcagaatcaaggacaaggcgactgagtgtaacaagggagggatatcggctggagagatttgacaagtcagcagggtgcagagatgcagaattccttaagctatgaacagaggtcagctttactagtgggacattattttaagacattaactgaggattctctccttctcctaccaccctgccacattttaggtgcttttaccactcttggaaaaaattgtctcctaaatgtacagtcctctaaaaatgaagagattattcaagaagcacagatattggaatttttgcctatgagttccaaaacagtatttaaagtcatggtagaaaaaaactatcttgaaaggcaacatgctttattaaccagactttctcagagagcaggtaataatggccgtatttattgagcattcaatgtgcaccaggcacagttctgagtctctcatattttgtcctcaggaaaaccctgacaaaggtagcattgttgtccccattatatgcttgagaaaactgaagaaaagagaggagaattaacttgcccaagccacacagcaaagctgagacttgagcccaagtagtctggttccagatgtcatgcctttgggatggtgttttgcttccagtcatctggctttggatctcaagggtcaaacaggatggccctgactgcaccccaccccaacatgggcaggtgatgggaatgaaggaggaacctagaggtgaaagggtggggatgtgctgaacccctgacatgtgtgagggtgcctggcacatagcagaggagagtagggggaggattcaggtagtatctgttggccaggctgcctgggcagagtcagagggttcaaaagaggaaaaaaaatggagctgtctgaaggtaggggaagggggttcacaaaagcgatcaacttgaagggggagacgtagggtgggatgctggcaagaaagggagctaagaattcctaaaagcctaccaggatagaagctgcacccttctatccctgtgttctgagctggctaaggacctcggtcttgggacactcccaaagcatggaggccctatgatcagccaaagaggcagtcaggttcttgggttcagtgacaacaccccacctaacccgcccaggttatgccccttccctgacgcctcccagtcctcaagagccccctgctggctgtcagtagaggcccaggcacagttttattccggagaatctggaaaggcaggtggatgggtcagagggtcactgcaagcccgcgttcaggggctccactcgcagccaaagtcctccttcagcgcgcatgatcagctccggcttcctgcggggctccgtgtggtccagcaggaagcggaagcgcagcagcgtcagcgccaggaccaccttcatcttcgccatggcgaacgcctgcccgatgcagttcctgcgggtgggagtggggactgtgactgcgcccaggatccgcatttgggccccatcacgccggaaacctggcccgggatcctcaaccgcacccagatcagcctgagagatagagaggggctgagcatgcgtgggacccccctgtgggtttgcatgtcccccagagcctgggccagactccagctcccagctcagaccagcagatggaggaggggattctgagcactctgcggaccctctaggacctactcacccccattctatggacattttcccataaactgtgaaggaatggagggaaagagaactggaactgggaccatctgcaaacttccccctttttcgaccctcgcacctatcaccccatccccataccagacacaggtggcccttacctgggtcccgcagagaagggaataaaagccagaggtgacctctccttgctgttctctgagttgaagcggaaggggttgtagacctggaggtaagaccaagagggctgctgggtggggtctcccaggtccagcagccttggaaagacagttgtgtgtgtgttggggcgaggtgatgttggattttcctgatcaaaaccctgcctcctcctctaggaaccttggaattgacaaagagggcagggggtcgggggtggatgggaaaggcagcacctcaggatccggtcacacagttgggttgtgatggattcctataatgttgatgatgcagataatgcctgtgggagagaaggtggcagtcaggacaaggatccccctgaaggacccctcttcctacccggggggctcctccccatgaggctgtgagcatctttggggatgaccctaccatctgggagcacaatgtcccagatgcggtggcgggaggtgtacggaacagggggatgcaaccgcaggctctccttcacgcacatggtcaggaagggcagctgggccaggtcgtacctaaggcaacaccccagccccaatcattatcaagggagcaaagacacacttctccagcttctctatttccaagtgagaccttttctccctgtaacaaaataaactccacatggatcaaaagtttgagaattagaaaaacagaaaaaattagaaaaacagagaattagaagtaccagagaaaatttagccaagtagttaaaaatatatactctgaggaaaacacacccagaagccagctgaaaaaagttaacaaatttgcataaaaataaatattgtctatggcaagaaagcaaactcaaatgcaaatgaataagaaacaaaatacccagatccaatgttttgctcttatttcgcatggaactagagataccagcaagtgcaattaggcaagggaaaaacaagagagtcatgcaatttgaaatgtgggagtaaatgtatcattttggcagatagtgatgttatacttagaaaacacaggaagctccactggaaaacgtttataaacgtttaagatccagtaaaggagctgaattatctgcttaatctttcttcttttgccttggctatttaaaattttaataccatctaaacctatctgattcagaatttgaaaactgtaaaatataatccactcctatggcccaatgccatctacttctccccacatgttgcccaggttattatttttttaatgtgtccttcctgtgctaatatttagtatattaaaaaaattatataggagcacaccatctactatacactagtattctgcatcttttttttttttgagacagaatcttactctgttgcccaggctggagtgcagtggtgcaatctccgctcactgtaatctccacctcccaggttcaggtgattctcctgcctcaatctcctgagtagttggggcttcaggcctgcaccaccatgcctggctaatttttttgatttttagtagagatgggattccaccacgttggccaggctggtcttgaacccctgacctcagatgatctgcccaccacagcccacctcagccttccgaagttctgggattatagccatgacccaccgtgcctggcctatatctttttctcatttaacagtttatcactttttcttagcccctggaacttacgtcaaaataaggttatccctactctggagctatgaaataattttctcatggtttcatctagggcttttaagactcttttaaaaaaattttattaatctggacattatcttgtcataagacatgagaaccagcttgttgccttttttccagaaggctttccagttgtcccaagagcttttacttattttttctcttgatacacagcatcatctttagcatgtactgtgttcattgggcacagaatttatatgtataaatcattagtttttcatgtagaaataaccaccaactgaaaagatgataataaaagatgctagtcataataatataaaatacctggattaaacttaaaaagaaacatgaaatctctgtattttattataaatttctctcaatccaaataaaagatacactttaccatggcaacaaatgtatgtaaggggtgatttaaaaaaaagtcactctaccagctattaaaacctattaagaagttgcagtaatagcaatagtctggcaatgctgtaagaacagaaaaacagacctattcaaaagactagaaagctcagagacagacaagtgaataaatgaaaacttcccatctgctgaaggaagctctacgaaactctgggaaatagatgggtactatggctgcaaaagaaaatgtagacgaacgaaactctgggaaatagatgggtactatggctgcaaaagaaaatgtagacgaatttgacttcataaaaattaaccaaaagtaccctcaaacaagtcaaaaggcaatcttttgcaacaaaagacagaaaaaaagattattgtaatacacatccttttaagtaagtatgaaaaaacaacccgaagaaaaacagcaaaaaaaagaaaaaaaatgtaagatgaccaatcccatagaaagaaaacaaatggcgtatcaacttgggcaaaagatgttcttctccctcttatttaagaaaatgttcattaaaagatgaaatattaaaattgacaaaaacttaaaatttaataatacagtaatgctattggtgaatttatggggaagtttaagcttatgccatcaaactcagctaatataggaatggatttgcactcatttttacaattgtagaatgcaaatggtctttgattcagcaattccacctttgggagtgtgtcctacagagatgcccacacatataaacagtggtcactgtacacacatgccaattgcaacaggtttaatttagcaaaaggctaaaatgagccaaatatacatggataggaagatatttagataaacatccacacaatggaatagtatacagctacacaaaaggaggaaataaggatcactagtcctgtcacacaatgcaggctagaaggtgaatcagtacagagactctgaaaggcagattgacaattccacaataattgaaaatgtttacacaagtgacttcaagaaagggacaggccaaataaagtatggaatgctattcagcagtcaaaaaaatagctatcagacacactgttgagtggaaaaaaaagtgttccaaaatgtctatatatatatctcatagtgcaaaatatatatggaatatataaggagatagatgatagaaagttatgtagatagatggataaacaaacagacagacagatgacaaatcagtatctctacaggcccctttggagaaagggaggatattaggtggggtagcaggaatgtcaaggataacccttgtcttatctgtaatgtctcattgagtgcaagaagaacctgttcttttgtaattcaaactcatttttttgtaattctcattataaactcattttccatgtggtatatatacaaaatggagtgctattcagccttaaaacagaagaaaattatttcatttgtgatagcatggaagaacctggaggacattatgctaagtgaaataagccaggcacaagaagacaaatagcacgcgaccttaattacctgtgagatctgaaatagttaacatagaaatcagagaaactgagaagagaatggtggttaccagaggagggaggaagaaagagtggaaagacggtcaaagggtacaagtttctgttagacaggaggaataagttttgagacctattacatgcatggtgactacagttaataataatatatttttcaaaattcctaagagagtaaatttcaaatgttctcaccataaatatgatgagtatatgaaatggtggttatgtttatcagattgacttaatcattccacattgtatacatatattataacgtcacattgtaccccataaatatatataatattaataaacataataaataaaaataaacttattttccaaaactcatattttgagaaaaagaaaagaaaagaaaacatcttgctgggtacagtggctcacgcttataatcccagcactttaggacaccgaggcaggtggatcacaaggtcaggagttcgagaccagcctggccaacacagtgaaaccccgcctctactaaaaatacaaaaattagctagacatggcggcgggtgcctgtaataccagctactcaggaggctgaggcaggagaattgcttgaacctgggaggtggaggttgcagtgagccgagatcgcgccattgcactcactctagcctgggcgacagagcaaaactgtctcaaaaaattaaaaaaaaaaaaaggaaagatctcaaaagatatagtgttaatgtgcagatctgtgacactttatttctttttatttcaacagcatttggggtacaagtggtttggttacatggatgaattctacagcggtgaattctgaggttttagtgcacccatcacctgagcagtgtatactattcccaatatgttgtcttttctcccttatccacctcccaacctcgctccctaagtctccaaagctgattatatcattctgtatgtatttgtgtcctcacaacttagctcccacttagaggtgaaaacatacagtgtttggttttccattcctgagttacttcacttagaataatggcctccagctccatccaagttgcagcaaaagacattatttcattcctttttacggacgagtagtattccatggtatatatatatatgtcacattttctttatccactcgttggtcgatggacacttaggttggttccatatctttacaattgtgaattgtgctactataagcatacatgtgcccgtatctttttcatataatgacttattttcctttgggtggatacttagtagttggattactggatggaatggtagatctacttttagttctctaaggaatctccttactgttttccatagaggttgtgctaatttacattcccaccagcagtgtaaaagtgttcccttttcaccacacgcacaccaacatctattgttttttgactttttaattatggccattcttgtagaaataaggtggtatctcattgtggttttttcatttgcatatccctgatgattagtgatgttgagcattttttatatgtttcttggctatttgtgtatcttcttttgagaattgtctattcatgtcctctgcccactttttgatggaattatttgtcttattctggctgatttaagtttcttgtagattctggatactagtcctttgtcagatgcacagtttgcaaatactttcttccactctgtaagttatctgtttactctgatgattgtttcttttgctgtgcagaagctttttaattcagttaggtcccactgatttgtttctgtttttgttgcatttacttttggggtcttagttatgaatcctttgcctaggccaatgtccagaagagtttttccaaggttatcttctagaatttttatggtttcaggttttagatttaagtctttgatccatcctgagttgatttttgtataaggtgagagatggggatccagtttaatttttctacatgtggctatccagttttcccagcatgacttattgaatagggtgtccctttcccaatttatgtttttgtatgctttgtgaaagatctgttggctgtaagtatttggctttatttctgggtcctctattctgttccgttggtctaagtacctacttttataccagtgccatgttgttttggtaactatagccttgtagtataatttgaagtccagtaatgtgatgcctccagatttattctttttgtttgttattgctttggctgcacaggctcttttttggttccatatgaattttagaattgtttatccagttctgtgaaaatgatgatggtggtttaatgggcattgcattaaaatatgtaggttgctttgcatggtatggtcattttcacaatattgattcttccaattcatgagcataggatgtgtttccatttgtttgtgtcatctacgatttctttcaacagtgttttgtagtactccttgtagagatctttcaccaccttagttaaatatattcctaggtattttatctttggaactatttttttggcagctgtgtgagtcagagggcagttcttaggtcactggggtaatgttccagaggtgagtataactgcctctgccttgcaaaagagcttgcaaagggagtggagagtagcaggtggcagtaagcctcatccggctcccatgcagttggcaagactgatctcactcctgcagtgctccacccatagcactggatttagatccaagtagtctatgcacagaactcagacctgccccaggccataagcttttcccccagagatagcaatacttttaggccatgcccctttttgtccctgtccaaggccaggcacccagctcctgcactcctgtctgcagtacacttcccgcttgccccctgggttctggtcaagggagttcatccccacttgaggttatatcaagaaattcagttgggcatttcaacctgtgacccctgcctgagctagttggctggcttctgcaaggtctcctgtgagatataataaggaatggcttccctcagtccatgctggagattgggaatgcctgcaaggcactttctgctgctgcttctatttttatatttcttaccactccctaaatcagttccagctctgggtagagttaaggcctccccctgtggtctggcttttcagactccccagtgaagatgtgtaccctggaggcagtctctccccctctcacactctggggattcacagtttttcacctgtctcacagagtaggatgcagcctgcagcttcttttgaagggtctatggattcttttgggtttcctgttaagcctctgtgttgttttttggggaaagaaagttcacagtgtgaatctctacatacttttttgtccttccacaggggagagacacactgacattgcctccaattcatcatcttggaaaagaaatgttgtgtctattttatatactcctatttgtatagaaaaagtctgtgttcatataaagtgggcatcaagataaccattttactggaaggacacacagaaaaccattgatggtagaaaccgctagtgtgagacttaagaaggaagctcattttttatcataaatttatggattttttttgacagagtgcacaattttgcttgaaagctaggtttttaaaagcatagaaatgtgttgccacttcacaggactgctgggctgagcaaagtcttggacgggaggacactgccttcaaaacacctgtccagtccattgcctcctctccatccccagcccctggcctggctcaggtcccagaatgtcctcactgggacttcattctacagctgatcctctctaatatgctctccacagtagtcctgaaaggatcttccttctgcccagatctggcctacccctcccctgctcacccacttcctatggctcctaattgcctttgggttaaaatggaagtcattaacattttttccatgtcttccacagccaggctctgctgccacctccattattattatctcatcatgactcagtttctccctctctcattctctgtctcgttttctcttccctcctctctttatctctctctgtccctcactttccctccctcttccttctttctccctttataaccttctccttcccccttacacaaacaactccttctctttttccctcttctccctctctcccacccctgcttctttctgcatctttgccaaggctgtctttttgacttagaccactactgcatgcaaacgtctactgatcatcattcaggatctcagttagaatacttttatttatttatttttactgttttagagatggattctttctgtattgcccaggctcatcttaaacctgacctcaagtgatcctcccacctcaacctccttagtacttggtatcatgggcgccagccaccacatctggcgtgaaacacttactatattctcagtctgcttctcttgttctcaataccatccttgtccatgtggacagagaagtcctacctgagactcttcccactaggctgggagtacctgaaagacacatccctggacagtgttctttccaggtatccagggaacagaaaggtgctgggaacagaactggcattggtaagacatgtggaagagtttgctgaatgaagactgaatggatgaatgatgcaggtattctagaaagagatagatgacttttacccccaggtctcctttacaactccctggactggactggagggtaggaattagggaacagaagagcaaacatccaggaagtgaagatgtttgaaaaaaatgataattcagagaaaataagaagtgagtgaagggaaaattcattgactgaacatgtctaggtgtcatcatctgccttcacatattgtcaccagctctctcagcaggctaggactctctgtcctaaaagcctgaaaactttcccctgctagccaggctggatatcaagttctgcctctgggctctgctcctaatactactaagcaataatggaagaattgacaaaaacaactttctcccttcccacttggggagcagagccaatgacgggctcaggaacaggccagaagaacctgcactcaccattcaatctctttaggatcgcggtccttcagaagctcttgcacctcctgccggcagtgctcctggtattctgggtgcctcgcgaggttgtacaggacccaggagagaccactggctgtggtgtcatggcctgaaggggaagcaggcaggcttgggtctctgggctgcttcagcaccagagggtggacagcgtccatgcattgaggccctcagggaggatggagggagggggaagataggcagaattgagtgatccagggcccacccaccatgttcctgagatgaaaggacccctgtcctcactgtagtcccacactggcagcctcacctgcaaacatgaaggtgtcagcctctgctcttacatcctcatctgacaacaccttcccatcttcatcctgaagggaaagcaagacaaaccctcccccaaatttactatctctgagactcccgagtctcacctgagacaatctctgaaggtccgatcttcttccagaaactcaaacccactctgaatgtctagatctctcttgttcaccatcaccagagcccccattccaaggtcttccccccagctcctttgccttgtctttggtccctggtgggaggaatcaatgactcgaatattttcatatttctgtataatgaagactttaagagaaaaagatactggcaacttggggtacaggaagtttaaatggcaatttgccttggaggttaaaaattacatattgctttaaagatatttgctcacattctagagtggtaaactcagagaatcttatctttccagaagatatttggattataaacctatagaaattgccatctcactggagagtagtagtttatactcctgaacaaagcattctctctctctctctctctttcaccctgtaaaaaagaaggagcatatgaactaactgtcctatataagatataagactcataatgtgggggcccctctcctatggtgcaaattcttgtacatttacaggtaaaaacattgtgttgccctagaaatggggagccagcacaacaatcctactcctcccactgttactgctgtaaataattaatgggctgctgtaatccaggggtttggtgcatctgtcatcatagatatagacatagacgaagacatagacataaataaaaatgtgaaagactaacttactaacttgtaagttgagtaaaatcgcacgttcttcacagtttcagaattagcagtcccctgcgggctgcattcaacagaatcatctctaaaacctatctgtgaccttccctttctcaagcatcttccatggctcccagtgccctctggatgaagtccaatttatttcatctgacatttgacataaagctccattctatcactgtaattcagatcgtagagaaacccaccttgctcagcagaagcacatcaatgaaatccaaagtctaggacttggctttgttcttgaggaaatcacaataccctgagtgggaagggtatggcgccgctcctggatgacggcatctgtgaagtcgtgcaccaggcggcaggccctgcggaagcgccacccgtcatgggagaggtaatacagaaagtccatgtgctggaggatatgctggtttcttttttctacaagggcactgagctccaagatggtagcaatatattcactgggcctcctgcaggccaagggcagaaagggaggcaacaatgtaacatatgcaaagcccaggaacacctcccaccagcagccaggagctacctcccatcaggaaactgagtatctagaaacagatggtcctagagatacatgatgggtatctgtcctgagattgactctctagactctattccctccctgcatcctatctctgagagctgtctccatgcacctaggtacccggagtgtagcttggacaccatgtttctctcatctcccatccagtatccagtactgatcatattccttaccaaaactgtccacacaactcagacttcatcctcttccacttcagcccgactccagcccccaccataaccaatttgtacccaatgtcagctccatgtagtgtctacactactgtcagattcccacacagctcagctcttaccacagccatcatcagctgaaactccttcaaaagctccctgggaccatcttgataaacttcataccacttttcctgattttcagtgtccctaatatctaatcctatttccacaaccacatttctactgtctgttgcatatgcttggctcatcctaaccttattactgttactcaaatatttctacctacctggaaagacaacactttctccccttccttgaccttaaaagcccagctatgatacaaatcctcccgaaaggtacttctggttactttgctcattcctccctccccaactttctccctttggtccatggattcacatcccaggccctgggaaggaactcactcctgacaatggctgtcaaagctgaagatgcatttctgcagactgtccaaggtcatgaggctgatgtgctcaaacatgtccagacgactgctgccctctgaggccaggtgctgccacttgtcctggccagagaaatgaagacggctagagctgggccctgcctcctttgtgcccctccccagtcccaaacatcaggatggactcccccacaaccagcctcctggtcctctgccccaggaacccattgccagtgaggaccagacttggatgcgagcagaagctgttagtataggagatgaagacccatggcttggagtcaagagacctgcattcaagtctcagccttgtctcctatgttctgtgtgcccttggtcaatctattgccctcctctaggtcccacatgtcaaatattcaataatggtcaagatgatctgctttgggccagataaaccaggacagaatctctgctccaccacccctagatcagtctcctagctggagactggttgaactgtttccagctcgctaacctctctggccctcagtttcatcatctgcaattgggcaaaaataaccataactcacagggttattaaaattaaattagacacatatgtcatggaacggggacatgacattgttttaggcctatggtgagtgctcagtaaatgttctcttcactcttctccattgttacaaagtcatttcaaaaatatccctgtgttggaagaggcacttcttcatcagccctgagcatccttgctgggcatgccaagaatgcaaggccatgatgttcttacttcagccatttttcagagttgtgtttgcagggaacaacctggagagataaggcaatgaatccccctggaccaatatcaggcttgtttctgctactattaaagcagattccttaagcctaatgcccattgtctgtcatgcaatgtactgcatgagcaggcaactagcaaggcccactgtgtcacccccatggaatttaggttgactccgaaaaaggatacaaaccaacaagacatacatgttgcttgctgtgcctgagtaatcaactaccctttgtctctgacccaggggtcttgtgtcttctattagaatgcatgaaacagtaacaagctaacttatcagcttgcaagtaaaagaaacatcctaggcatatcacaaaatcctgacccccagttcttcacttctctttgtatttacaccctttgcgcagtaatttttcagcagcttccattaatagatggattctattttacatcccttttagtctgtgctggacatttgattttctttggccaatacagtgtggtgaacatgatgatgtaataactcgaatagccccaaggctggttgaactttgaagattgcagagacaatgtccagaaatattgcagcctcctctcagtttctcggaacccagtctctgccatgtgaacaacagggtgccttctggaggcagagaatcacatgggggaaagtccaggtgtcacagctgaggccatcccagatcagcctgaagctagtgaagccctaaacatgtgaatgaactggaccaggatcagcaaagctgcctacatgccccacagctgctcatgtaccaaagttgatcgcatctacatccggaagaaccagctaaatgtctcacagactcattagcaatcataaacctttattgatctaaaccaatgggtattgaagtggtttgtaattggtaatggctactatgcaatctttgtctttacttttgcatttacctggcttctgtgaaaggaacatggaatctgacaccttctgagtatctactatgtgctagggacatgattcgtttgcattatcttaccaccttttaagtagggattatcatccccattttacagatgaggaactcaaggctcagagaggaacagcaatggcctaatgctacccagcagagccaaaattccagaccagatctgtccatggtccctccaccccaagactcctgctgggacccagagttcaaggaactcacgtgcatgatgttcacactcctgttgaagatctttatatagggtttcaggatgttgaaatggaaggcgggcgtcagcatccgacggtggcggctccacttgtcaccgccactcagcagtatcccttctcctagtagggcagccaaggacagtgggcaagagcagcaccttccccacccctgctcaaggttgtccccagcccctttcacctgcaggtactcacccagccagggcttcaggaacctgatggagagatcatccttgggcgcaatagcagctggcatgaatgaggaccatcaggggccatgtagagggcaagagaggaacttcaggtataaggcaaggctccctaccagcactttccctactccatgcccagcatagcaggaagggggccaagggcaaaggacgaagggaggatagaggaagaaggaccagcccaggctgcaacagcacagtagagcaatgacacaacctaacagggcacagcactccccagcacgccttgacatggctcctatatatcccaacatgttctgcaacaactgagcacagctccacactctacaaaatatctttaaaggagcctaggacaccctgtctgccccagcactctctgtcatctcctgaaatggacctgggacctggggcatgtctccaatgttaacatgcctgacatggccacagcatacatgatgagccctaaatgacacatcgtctgacatggacctaagatagtcttgcatgacttctgtgtacctgacaggccccagataggatttaaatatgatttattaaatgtcctggacatgtcccaggtgtaaccaagacttctcttcaagcatgattggaatggattctgagacctggctcaggaagactaaaataataactctgacaattctcaaagggaccctgggtcccagatcttggacaagccacaaacatggccaagagatgacaagaaggagaaaagacaatttcaaaccacatgtcagagaagaaccagaaaggctgggacatgccccaagtgtccttggccacagctgagccacacacatgatgacttctccatatgatcccaggtaaaacatacgagatataatcaggtataatatagaaatcgtaggctatttatgggaccccttggggaaaggtgagctttctgacaagagctgagcttccaagacccatggttgacaccataagagaagggctgccttaaaagaaaaagtgacttccacaatggttgaaagtataataataaaagaaaagaaaaaaaaaaagaaaaggtgatgcagagaaatggtgaaattaaaaggagacaaattcctgatgctgtacattgacacctggatccagccatgcctgaagaccactttctctggactttacactccgttgattccctttatttgcttatagtgcacaaagttgagcttccatcactcacaggtgaaagagacctcagcagccagagagagcaggtgacctgcacagagtcactaagcattttggggtcagagccatagtttctgtgggacgttgctccttcccttctcagcctggtctgtccaaggatgggaagagcagagaataagggaagatcaacaagctggtgtgggatctctactggagattcttgaggcctacaggaggacagcagtgagcgtagggtggatgagtgacaggataaggtagaaggaactgacccatcatagatggatgtcacataaatagcagcccagaatcaccaccagcgacaagtcctcctaccgctctaggctgaaggatggacaaggttggtgccaggactggctgggcccccaaataccaatgatgctcattacatcatcctaccccacacttaaaaaaattcctactcataggtccagacccagctccaacaattcctcctccaggaagccttccagcctgccgcagcagaaccctagttctcctgtgggttttcacacccatctctctcttgcccattcctgaccccatgaatttggggttgtctctgtccagatccatctcctcaagtgtggaggttccttcaggacagggttctggattgaggcttcctggggccctggtggttcccagaacaccagagcagggggtcagatggcaaaggagttggaagacattgagatgaaatttggcaaatacatgaaggaaagcagaagatgcctcttcttctttcaatggagggagaagagagaaagaggggcctgggaactgcaggggcttcacagaagcctaggggagaaggagctggaagcccttggatggaagccccagcacccaccaccacaagctctgcatgggtacctgaggcattggtgatagaccggacgatgtcagggtggcataaaacgatgaaggggaagatgggacccagccatatcctaaagccctggggataggtggctgacatctgggtcaagttcttcaagccttcctctgtagcaatgatctgaaagcaagtcaggggccatcaccccttgtgatggttaattctaggtgtccacttgacagggctaagggatgcccagatatctggtctaacattatttctgtgtgcgtctgtgtttcaggagagattagcatttgaaggtaaactgaggaaggaagacctgcccttccttatgtgggtgggtgtcatcaaatccattgagggcatgaacaggacaaaaaggcagaggaaagggggaatttgctctctcttctgcagctgggacatccgtcttctcctgccctcagaactccaggttctcaggccgttttggactcaggctgaatttacaccaccagcgtccctggtttctggcttgcagatggtatatcatgggaattcctggcctccatcatcacattatccaattcccataataaattctctctgtctctttctgtctccatacatacatgcattagaggtaagaagaaattcccatctaaggagattccatttctagggagaaccctgactaatgcacctccctagaaggagccacggcaagtccccctgcagccaccagatgtggtgcagcctctgcagtgagcagcgtgtctggattctcaacagctgcagggggtttctgctgacctctgctccttctctcttggggctgtcccaggatccgaaggtaaataccaaagcagagagggaagacaagctgtctgctcaagaggatgtgttttctcatcctggaatgatttcagtctggggattgctttatagggaaaggtccccatgggaggtggtttgggacggcagtgtggcctcaggacatatccctagggcagattcccacatccttttgtgtcctggctggtccacatgggctctggttccccccacagataaagggtctgcacactgaggacccccccattctcagcagcccccagggaagcagaggtgactctaatgtccctcaggatggcagctcccacctgggagaacccccccttatgccaggctctgtgctagtgcctcctgtgcacctgtggacatgcccatcaatcctgccatttatgagtgagcagacggaggccacgtcccccaaaggggagggcaagtccaagtaggagggcaaggtttgggagtgtcaaggacggcttctgaaaggggaagagagtggccaaattatatcccggttgagctacagggctcattgggacatctgagtggggaagagcacgtcacccctggaaggggaaggtgtgggagactgcctgcacttctcttctggcccagcagtgtccctccataggggaaggaagtcagagctaattcctgtgggaaagcagcagcccagagatgagcagacacaaggaaatgggtcaggcagggagcagcccctggatagtgggctcaggaggcctcaagtccagagtggagaaggtggggatgccaggagagccctgctctgtgccccacagtactgcaggagccccttggaggtgcactattgtaggaaagacaggcagcaaaaggatccagacaggctggggtgggaggacaggtaggtgagaaaggcttgggatggaactacagaggaatgagtgagtgaggagaggagtgagtgagtgaggagaggagtgagtgagtgaggaggggagtgagtgagtgaggaggggagtgagtgagtgaggaggggagtgagtgagtgaggaggggagtgagtgagtgaggaggggagtgagtgagtgaggaggggagtgagtgagtgaggaggggagtcagtgagtgaggaggggagtcagtgagtgaggaggggagtcagtgagtgaggacgggagtgagtgaggaggggagtgagtgaggaggggagtgagtgaggaggggagtgagtgaggaggggagggagtgagtgaggaggggagggagtgagtgaggaggggagggagtgagtgaggaggggagggagtgagtgaggaggggagtgagtgaggaggggagtgagtgagtgaggaggggagtgagtgagtgaggaggggagggagtgagtgaggaggggagtgagtgaggaggggagtgagtgagtgaggaggggagtgagtgagtgaggaggggagtgagtgagtgaggaggggagtacgtgagtgaggaggggagtgcgtgagtgaggaggggagtgagtgagtgcatgggtagaggagtgagtgagtgcatgggtagaggagtgagtgagtgaggagaggagtgagtgagtgcatgggtagaggagtgcgtgagtgaggagaggagtgagtgagtgcatgggtagaggagtgagtgagtgcatgggtagaggagtgagtgagtgaggagaggagtgagtgagtgaggagaggagtgagtgagtgaggagaggagtgcgtgagtgaggaggggagtgagtgagtgcatgggtagaggagtgagtgagtgcatgggtagaggagtgagtgaggagaggagtgagtgagtgaggaggggagtgagtgagtgaggaggggagtgagtgagtgaggaggggagtgagtgagtgaggaggggagtgagtgagtgagtgaggaggggagtgcgtgagtgaggagaggagtgagtgagtgcatgggtagaggagtgagtgagtgaggagaggagtgagtgagtgaggagaggagtgagtgagtgaggagaggagtgagtgagtgaggagaggagtgagtgagtgaggagaggagtgcgtgagtgaggagaggagtgagtgagtgcatgggtagaggagtgagtgagtgcatgggtagaggagtgagtgagtgcatgggtagaggagtgagtgagtgaggagaggagtgagtgagtgaggagaggagtgagtgagtgaggaggggagtgagtgagtgaggaggggagtgagtgaggaggggagtgagtgagtgaggaggggagtgagtgagtgaggaggggagtgagtgagtgaggaggggagtgagtgcatgggtagaggagtgagtgagtgaggagaggagtgagtgcatgggtagaggagtgagtgaatgagccgcctccctcgcttctctgccggcccacacctcagccaccctctaaacccagctccttgatcccccttcctgccctttgggaattccatccaccctgagatcccagagtcatcctgctgccacactcacgaggtcctggttgaccccaaaaccatttctgttttgggggttgtggaaagtactgaaggcggcggcagttgtcatagaaggcataggtccaggccaggaagccggccaggagccgggaggccccagccagcagcaggagcagccacgggaatgctgccacctgcccgaggcccagccaggacaggctcagctgcggcatcctgcagggcagacaggatggagggtgagatcctgaggcccagggaaagtctcagggagctccagggacagtggagagaagcagggaaggggtgggtggaggcaggaaagggagggctctgggatgaataaacaaggactgagagctaaattccagaaagccccagccaaatccaatagccaagtggcctctagttgcctagtaaccacccagaaaggagaagagagagagagactgattagagtccagaaaggcccagcctgaatcactgggaggttgccaggggtccggttaccaggaaaccaccagtctcccaggccagcagcctggagacaccccagccttgggcagtgcccctccccatcccaggccaggaggctccagtctgaccacccccagcctggcaccttctgtcaggagcagcttgtaccacacaacctcctctcctcttctgctgggagttctttgcctctggcccctgatttagggaaaggtcgtgggaggctgggctgcgctgggctgggccagtcaatctccacagcctgggtgcatctcccttgcctgggagatgccggccaaaacctggggtttggccagctgggtgcagaggaaccagctcagggtgccccagtatggggactggatcctcaggtctcagcatctccctcacagtttagaggggaagttggggagtggttaaaggggactctgagccccaagtttacagccaccctgccctttcaaggcaaggatgtggcaggtaaaagcatgaacttgagagttcacagccacctgagctgggccaggccaacccttgtcccagatcatctgggctcctctccaaacatgggcggggaggatgtcaggtgctgcatcttggtacagacttaggagattcagagacagaagcctctcatctctggcttcacagcctggcaagagttcaagtcctgcctccaggcagcccagggcctgagctgagacctgactgcttgaagcaggaagaaagaatccagtcccaaccctgctgaggattacctgggtcagagtctggggataaagagcccagctggaggagcaaatctagaggctgggctcagcttagaggacagagcagaggcataggggatgaggctgagaggggctgtgagcagacggggtccaggcaggggagggcagagcgaggggaccccgagtgtagtccttgttctgacctgtcctttctctgactgtgggcaatgtggccatcctgggctcaggcttcccatctgggaaatgggatgtcagatgaggccttagagggcgacagaggaaggctcctaagaagagagagctccaaaaagagggactgaagggaaggggatgacaactagcacttgagctgctgtgtgcctgtctctactccatgcgaaagactgtatggaaaacactactgtgtgtacctactgcgtgccagtctcactatataaagtgcacctactgtgtatcaggtactctacataaattctgtctactatgtgccaggtacaccacataaacctcacctactgtgtgcagcatgctctacataatgtaagcttactttgtgcagagtactttatacaaagcgtgcctactctgtgccacatgccatatataaagcatacctactgtgtgccaggtgctccacataaagagtgtctactgtatgctgggcgcccttcacaaatcctgtatcttgagtccctggtcctttatataaaccatgcctgctgtgtgccaggtgttctaaataaagcacacctattgtgtgccagatgtcctacataaaatgttcctcctgtatgttgggccccgtacataaaataaaactgctctgtgcaacatacttgacataaagcacacatactatgtgccaggtacactacataaagaccacctactgtgtgccaggtatgccacataaagtgtgcctactatgtgttaggtactccacgtaaagtacacctactgtgtgccaggtgctctacataaagtgcacctactgtgtgtcaggtgctctacgtaaaccacacctgcttgtatcagatgcccagctggatgacaacgcccaaagctgtcccactaccctcccatcagctctctaggccagagtcccggggattgttggagagacccaaatgatggcatccagaggagggaagatgtccatttaacataaaagcaaactgaggctcagagaggccaggcctctagcccaagttgcagagctcacaggaactcaggtctatgagaccctcaagtccaaatcctttccttctgccgtgctgctccacccccattcattagggtcaatgccatattaatacagggacatttataatggaggaatttcaggcagcgtggtggcccagaggggagctatctggaggctgttgaatcagcacctggctcctcctcccacacccaggatgctccacccaacagatccagggctctcctcctggccctccctggatcctgtccagaattgccctatggggtagactcgggagaagggggtcttgaaggatggggctcctagcagagctgctgagcaggagggtggggaagacagtgctcctgacactagctgggtgttggggagcccctagacctcccccaccccaccaccactgccagctcaatcagccaggggattcaggctgaagggggccagcccctccacccctgtgggtatttctcgtcaggtggtacgagagactgagaaaagaaataagacacagagataaagtatagagaaagaacagtggacccaggggactggcacactcagcatgcgaggacctgtaccggtgccggtctctgagttccctcaatatttattgattactattttcactgtctcagcaaggggagtgcgagggagaagagggtgaacagggtgatgatggggagaaggtcagcagggaaacgtgtgagtaacagaatctgtgtcatgaataagttcaagggaaggtactgtgcctggatgtgcacatgggctacatttatgtttctctttacccaaacatctcagtgtagcaaagagtaacagagcagtattgccaccagcatatctcgcctccagccacagggcggttttctcctatctcagaatagaatgaacagtcagatttatactgagacattcccttcccagggacatgtgggaaacagaggccttcctcttatctcaaccacaaagaggctttcctctttcactactcctcctcagcacagaccctttacgggtgtcgggctggggacagtaaagtctttcccttcccacgaggccatatctcaggctgtctcggtgcggggaaaccttggacaatacccaggctttcttgggcagaggtccctgtggctttccgtgtccctggttaatagagaatggagaatggcgatgacttttatcaagcatactgtctgcaaacatattgttaacaaggcacatgccgcacagccctaaataccttaaaacttgattcaatacagcacatgtttctgtgagcacagggttggggctaaagttacagattaacaacagtatctcaaagcagaacaatttttctttgtacagatcaaaatggagtttcttatgtcttcctttttctacatagacacagtaacagtctgatctctctttcttttccccacatcaggcagctggacttacagcccccagtaagtggggtgcatcacccaatatacccaccccctctgcaaggacagacctcacctgctggcagttccattcctgtcagactcagggagcaaggccagagtttcatgaacaggtgggcagattgctttgagcccaggagttggagaccagcctgatccacaaggcaaaaccgtgtctctataaaaaatacaaaaactggtctcaaacaaacaaacaaacaaacaaacaaaaaacaaaaacaaaaactggccgggcgcagtggctcacacctgtaatcccagcactttgggaagccaaggcaggcggatcacgaggtcaggagatcgagaccatcctggctaacactgtgaaaccccatctctactaaaaatacaaaaaaattagctgggcctggtggcgggtgcctgtagtcccagctacttgggaggctgaggcaggagaatggcgtgaacctgggaggccgagcttgcactgagccgagatcgcaccactgcactccagccttggggacaaagcaagactccatctcacaaaaaacaaaactgaactaaacaaaaactaaactagccaggcatggtggcatgtgcctgtggtcccagctactcaggaggctgaggctggagaatcgcttgaacccataaggcagaggtgctgtgagccgagatttcaccactgcattccagcctgggtgacagagtgagacactgtctcaaaaaaaaaaaaaaaaaaaaaatctagattgcaattactttctttaagcacatggaaaaggacatctatagtcttccagattttacttttggcattgaaaagttagctgtccatctccttagaattaatctctctctttactcccctcttcttaactactgttatttttttctctctttttttttctgaagttttaacacaatgtgttacggtgtggatttctctttatggttgcttggggttcattgaggttctcgaatctaaactgttttcaatcagttttagaaaaatcttggccacaatttcttcaaacaatgcctgtgccctattttttattttacttctgaaattctaattaaacaaaggttacactttctcattctgaccctaatgttttcttccctctcttttatttttatttatttgtttgtttgtttgtttgttttgagacagagtctcaccctgttgcccaggttggcgtgcagtggcaccatcccgctcactgcaaccttcacctctcgagctcacacgattctcctgcctcagcctcccaagtagctgggattacaggtgttcaccaccacatctgactaattttttttattatactttaagttttagggtacatatgcacaacatgcaggtttgttacatatgtatacatgtgccatgttggtgtgctgcacccattaactcgtcatttaacattagatatatctcctaatgctatccctccacccaccccacaacagtccctggtgtgtgatgttctccttcctgtgtccatgtgttctcattgttcagttctcacctatgagtaagaacatgcggtgtttggttttttgttcttgcgatagtttgctgagaatgatggtttccagcttcatccatgtccctacaaaggacatgaactcgtcattttttatggctgcatagtattccatggtgtatatgtgccacattttcttaatccagtctatcattgttggacatttgggttggttccaagtctttgctattgtgaatagtgccgcaataaacatacgtgtgcatgtgtcttcatagcagcatgttttataatcctctgggtatatacccagtaatgggattgttgggtcaaatgatatttctagttctagatccctgaggaattgccacactggcttccacaatggttgaactagtttacagtcccaccaacagtgtaaaagtgttcctatttctccacatcctctctagcacctgttgtttcctgactttttaataatcgccattctaactggtgtgagatggtatctcattgtggttttgatttgcatttctctgatggccagtgatgacgagcattttttcatgtgtcttttggctgcataaatgtcttcttttgagaagtgtctgttcatatccttcacccactttttgatggggttgtttgttttttcttgtaaatatgttggagttcattgtagattctgagctttgttcttttggcttaggattgacttggcaatgtgggctcttttttggttccatatgaactttaaagtagttttttccaattctgtgaagaaagtcattggtagcttgatggggatggcattgaatctataaattaccttgggcagtatggccattttcacaatattgattcttcctacccatgagcatggaatgttcttccatttgtttgtatcctcttttatttcatcgagcagtggtttgtagttctccttgaagaggtccttctatctgatctttgacaacatgacaaaaacaagaaatggggaaaggattccctatttaataaatggtgctgggaaaactggctagccatatgtagaaagctgaaactggatcccttccttacaccttacacaaaaattaattcaagatggactaaagacttaaatgttagacctaaaaccataaaaaccctagaagaaaacctaggcaatacctttcagtacataggcatgggcaaggacttcatgtctaaaacaccaaaagcaacggcaacaaaagccaaaattgacaaatgggatataattaaactaaagagcttctgcacagcaaaagaaactaccatcagagtgaacagtcaacctacagaatgggagaaaatttttgcaatctactcatctgacaaagggctaatatccagaatctacatctgactaatttttgtattttgagtagagatggggtttcgccatgttggccaggctggtcttgagctcctgaactcaagtgatccacctgcctcagcctcccagagtgctgggattacaggcatgagccaccgcgcccggcccccaactcactaattctctcttcaattgtgtctgacatgcattaaacttctcctgggatattaatattgtagctttggttctaaaaattatatatcttttttttcaaatcaaccctgccgctctttacaatgctttatccttgaagatatttccaaaattacatttcgttatttaaacttcgtaagcaatattgtttcatagtccttgcctgataattccagtatctgaaatctttgttggactgtttctggagttatggggaactgggagattctgaaggtgttgatacctgggtcatgatgcaccctgtcaagtttatggggaggaagaggcagagctggagctcttggcccctccactccatctgggcttgctgcaggaacctaccgtgtgaccttggccttgttccctgccctctgtgggctttgtgttcccagaggcaaccatagaggatgcttcttctgagaatcacacctctgtgtctctccagatccctttcctgatatctgttgagaagagacaccatcctgggaaacatcacccagaatccagtcccatttttccaaaatgcttggaattggggcagcccagcccagcctcgctagccgcagggggtggtggtggtggtggtgtcagggtttgatggtggtgtcagggtttgatggtgagatctttagggaggaggtgatgtaaaaactgaaacctcaaatgagaacaggactgagataagtgagagtgagtagtggtggaaggggtcccaggcaggaggaagggaggaaagatggaagaagggaagaagagaggaaggaaggaagagaaggaagaaaagagggagggaagcagcaaaggaaggagggaggcaggaatggagagggcaatcccaaggtcccccgcctccctccttggacttcgattaccctgcatcctgcatcccaggcaggctcctcaagacacctctgggaacgtgccactggggaagacgcctgcagagatgaagctctcaccctgggtgcactgtgcccagggccattacaggcctggctgcaaggcgtccctaaaggtctctgatgaaggtaagtggagtcgtctatttccaaacctgctttccaggatgaagtggcaagagtactgggaggtggaagggagaaggcaagagaagcagggaaaattggaacagagggaggcacaggtttgggaaaagaaacgagagggagcatgggatgatatggagtaggggttctatagcctcagccacctgactccaggctggatcagcctgtcctcactccaagtcccccatagagtccacctactgcctagagcagccccctttccacagcagtcgtggccaccagggtccatgctggggtggggagtggtctctatactaagttgtggaggagggtggttctgagccaagcgggtgacattgagtgtgtcaccatgcatgtgggtgtacttaggcatcacccatgtgtactcctgccttcactgtgtgtgtgtgtgtgcagttgtgtgcgcttgtatgagattattgtagctgccatttcaaagtgccgcaaaccttgtggcttaaaacaagataaatgcattcttgcagggttctggaggctagacgtcttaaagcaagacgtctacaaagctactctccctctgaagattctaagggagaagatgccttgcctcttccagcttctgggtgctctaggcattgattgatttgtagctgcatcgctccaatctctgcctctctcttcacgcgaccttttcctctgtgtgtcctcccctcgtctttgaggggcaccagttgttggatttagtaaacaacctaattcagaataatctcatttttatttttattattattattttttggacagggtctcgctctgtcacccaggctggagtgcagtggcacgatcacagctcactgcagcctcgacctcccaggctcaactgatcctcccacttggcctcctaagcagctgttagcgcaggcacacagcaccacgcccagctaatttttgtagagatggggttttgccatgttgctcaggctggtctcgaactcctggattcaagcaatcccccgccccacccaccttggtctcccacagtgctgggattataggtgtgagccaccacacccagctgatctcatttttggatccttaccttaatgacatctgtaaaagactctattgccacctaaggtcacattattttattttagtttagtttagtttggtttcagggtacatgctcaggatgtgcaggtttgtcacacaggcaaatgtgtgccatggtgctttgctgcacctatcaacctatcacctaggtattaagcctggcatacattagctatttttctgaggctctccccacccctgccctaccccaacaggccccagtgtgtgttgttcccctccctgtgtccaaaggtcacattctgaggttctgaatgaacatgagttttggagggacatgattcaacacacacagtgccctcacacatggaatggctgtgtgtctccagtttattccagccccagatgagcaccaggcatttggcaagggctccataggtgtgtgcagaatgagtggtggtgtctctggttctggctgggggtgtcaccgccagtgtgcatttcagagccagtgcgactgtgtggcattgctcagatctgtctgcctttgcatctgtgtgttcagttgtatgataaagtgcataagcagaaagagctggatgagttgaattgtgtctcctttgaggagagagggcactggagcagggtctgggagcctgcgtgtgtgccagcctgggattctgcatttgcaccagcctgggattctgtgtgtgcaccagcctagggttctgcgtgtgcatcattctggagttctgtgtgtgcagaagcctgaggttctgcgtgtgcaccagtctggggttctgcctgggagccctcagctgggagaaggaccctgacctttgtccttccctaggtctagacttgtgcaggggagttggagagcccccttggagatttctgctaaggtgctgttctgggaaagagtgggacagaatgtgccagagagctgagagagccctttctgtatttctcttttcttttttttcttttcttttctttttttttttttgagacagggtctcgctctgtcacccaggctggaatgtagtggcatgaacatggctcactgcagcctcgaattcctgtactcaagcaatcctctcacctcagcctcctgagtagctggaactacaggtgcacatcaccacgcctggctaatttaaaaacaatttttttggtaaagatgggatctcactatgttgcccaggctggtctcaaactcctggcctcaagtgatcctcctgcctcagcctccaaaagtgctgggattataggtgtgagccactgggcatggcccctttctgtaatttttagtaacatttgtgcatttaggagcagggaccttggagcctgttggtagccaggagagaggaagaggtgagctgcacaagggagggagtgctggagggtaggaggcatttacagtgacagaagaaggttcatctggaatggggttgaagtccctgactgtcacagtgccaatgtgagtcacctggcaggcaaggatgagtggcaaccagctcagcagacagcaaacagcaatgatgacagagatgatcacgacaacgtcagctggcagccttgagaactgtgtgctaagcacttggcatcccgtcgcccagggaacccccagggcaggtctctggttatcccagcatacagtgagaacctgggatttgaaccatgggtctgcgtgactccacggcctggatatgtcttagagaattgtctctggctgtcagaagagggatggggcagaggaggggagattggtaagcaccgtgggctgagagagagggcgtgaggccagagctggggttgtgtccctgctatagagggggagggagtgaggctcagagatgacagatgagggagaggagggatgaagaagaggagggagttgaggctatgctgcagttgttggcttggctggctgggtcccctccagcccacacatgctacttttctgtgtggaatgatcattcctaacttgagccaaactgtccattttccaggtggtattctgagtcctccaagcattgggctaaccttggctctgagagatagttagtgacaatcttctaggtagggctaggaggaagtgtaatattggggtgaaccaggtcccaggtaagtattcgaaaacgtgctatcacaacagtagctttctcatagaagtaaaaagtaggacagaggatactagaggctgggaagggtaggcagaagggagagatagggagaaattggctaaaagatacaaaattacaaatagaggccagggatggtgactcacgcctgtaatcccaacaattcaggtggccgaggcaggcagatcacttgaggacaggagttcgagaccagcctggccaacatggcaaaaccctgtctctactaaaaatacaaaaattagccaggtgtggtggcgggcacctgtaatccgagctactcgggaggctgaggcaggagaatcacttgaacccgggaggcagaggttgcagtgagccgagatcatgccactgcactccagcctgggcaatgagagcaaaactccatctcaaaacaaacaaacaaaaataagtaaatacaaataaaatttaaaaacagtagtcttcagttaatcaaagatatctatatagttatatagataccatacacacacacacacacacacacacacacacacacatttttgttggacttaaactacagatgtactccgcaactcctcagtgatattttatcatccttatttgatcatcattgatatgaacaacaggggtgatctcattttatttattcccatttatcatcatgtctcacttctacttcccttccctgcccccaccacagacagctgttccattttgttcaaagtgtatccctttgtttgcatgaattattattatttttttttttttttgagacggagtctcgctctgtggcccaggctggagtgcagtggcgccatctcggctcactgcaagctctgcctcctgggttcatgccattctcctgcctcagcctcccgagtagctgggactacaggcccccgccaccacgcccagctaatttttttgtatttttagtagaaacgggttttcaccatgttagccaggatggtcttgatctcctaacttcatgatctgcccgtctcagcctcccaaagtgctgggattacaggtgcatgaattattattaaattctccagcctaggtgacagagtgacacttggtctcaaaaaaaaaaaaatcctctcttttagcttttttgaaaatatgcaataagttacaattagccatattcacccaccagtgctgcagatcttactggaattttgccagtttgtcagctaattccctctttatgttctagggcacaattcatttcatttagttgttatttctatttttcattatcatttttttattcgcattttttaattttccttttattctaaagattattatgtgatatgttactgtggcaatatcacgtaactcaacctgatatttatgttctaaatatataggtagttttaagggtcctcatcttagtaatttccaattttatttcagaatgctcagaaaacctgggtctttcttttattagcacttgctacaaattaagagaactttagtctgaccatccatgccggccctcaatcttaaattctttgtttgtttgtttatttttgagacagggtctcactgtgtcgcccaggctggagtgcagtggcgtgatctcaggtcactgcaacctctctctccttggctcaagcaattctcccacctcagcctctcaggtagctgggattacaggtgcatgtcaccatgcccaggtaatttttgtgcttttagtagggacggggtttcaccatgttggccaggctggttttgaactcctgacctcaagtgatccacccacctcggcctcccaaagtgctgggattacaggagtgagctactgtgcccggcccttaaccttaaattcttaagtgtttattccaggccctgtggcaggtacattatgagcataatcttattaaatcctcataacaaccctgtcaatttgggattattatccatttcttttagggatgagaaaactaaggctcacaacaatcaagggaccaacccacggtcccctagctctgaagtggggatccaacccaggtgtggctgaatagagaccaccgagatttaaaaataggaataataattattatttttatcagtattactatttgtgaggttcttactacgggccaagacttgtgcaaagcaagtaagatgcatgatcttatttaaacctttacacagtttgtttttgtttttgtttttgttttatgagatagcatctcgctctatcacccaggctgaagtgcagtggctcagtcatagctcactgcagccttgacctcccaggctcaatcgatcctcccacctcagcctctcaactagccaggaccacagacatgcaccacaatgtgtggcacattttcttatacttcgtagacatgggggtcttgctattttgcccagactggtctcaagctcctgggctcaagtgatccttctgcttcagcctctgacgtagctgggaccacaggcatgcaccaccatgcctggctaatttttttttaaatttttattttgtagagatggagtttcactatgttactcagggtggtctcaaactcctggcctcaggtgacccccctctgcctccgcctcccaaagtgctgagatgacaggtgtgagccatcattcccaggctaaacttcagcacattattattaacatatttttggccaggcgtggtggctcaagactgtaatcccaacactttggaaggctgaggaaggtggatcacctgaggtcaggagttcgagaccagcctggccaacatgctgaaacccatctctactaaaaatacaaaaatcagctggcgtggtagcacatgcctgtaatcccagctactctggaggctgaggcaggagaatcacttgaacccaggaggcagaggttgcagtgagctgagatcacaccactgcactccagcctgggtgacagagcgagaccccatctcaaaaactaaaactaaaaataaataacatatttttgcacatggagtaaccatggcttggacagatgaagaaggcgctctcagatgtcctcccaggtgggagtcactagacacccctgtgctcctaaccactgggtcttctttcctctctccaccaactaggggtggccgccatgcaggggctaaaccacacctccgtgtctgaattcatcctcgttggcttctctgccttcccccacctccagctgatgctcttcctgctgttcctgctgatgtacctgttcacgctgctgggcaacctgctcatcatggccactgtctggagcgagcgcagcctccacatgcccatgtacctcttcctgtgtgccctctccatcaccgagatcctctacaccgtggccatcatcccgcgcatgctggccgacctgctgtccacccagcgctccatcgccttcctggcctgtgccagtcagatgttcttctccttcagcttcggcttcacccactccttcctgctcactgtcatgggctacgaccgctacgtggccatctgccaccccctgcgttacaacgtgctcatgagcctgcggggctgcacctgccgggtgggctgctcctgggctggtggcttggtcatggggatggtggtgacctcggccattttccacctcgccttctgtggacacaaggagatccaccatttcttctgccacgtgccacctctgttgaagttggcctgtggagatgatgtgctggtggtggccaaaggcgtgggcttggtgtgtatcacggccctgctgggctgttttctcctcatcctcctctcctatgccttcatcgtggccgccatcttgaagatcccttctgctgaaggtcggaacaaggccttctccacctgtgcctctcacctcactgtggtggtcgtgcactatggctttgcctccgtcatttacctgaagcccaaaggtccccagtctccggaaggagacaccttgatgggcatcacctacacggtcctcacacccttcctcagccccatcatcttcagcctcaggaacaaggagctgaaggtcgccatgaagaagacttgcttcaccaaactctttccacagaactgctgaaatggctgactttctctcaagagatgtagcgaatgggaacactttagtcttcctcctttatttcttttcctttcctccctccctcctttcctccctccctcccttccttccttctttccttcctccctccctcctttcctccctccttctctgacctacagtccaccctccctcccccctcctccttgccttccttccatccttcctccctccctccctcccccttccttcttctctgcctacttccctctttcccttctctctgtctctttctgtttctatacctctctgtctctgtcactctctttctccctccttgttcttttgtttttgtttttgtttttgttttgactgagtctcgttctgtcacccaggttggagtgcgttggcacaatctcggctcactgcaacctccacctcctgggttcaagcgattctcctgcctcagcctcccgactagctgggattacaggcacacaccaccatgcctggctaatttttgtatttgtagtagagacggggtttcaccatgttggccaggctggtctcgaactcctgacctcaggcattatgcccacctcagcctcccaaagtgctgggatcacaggcgtgagtcaccacacccagccctgacttttttactgtagacatcccagtggtttcttattggggttttgatttgcatttccccaatgactaatgacaggctttaggtgcttaacacatgtgagttattttacttcacagggaagataggattactaactccattttgtttgttcgttagttggttggttttatacacggtcttgctctgttgcccaggctggagtgcagtagtccaatcatggctaagtgcagcgtcaacttctgggctcaagcaattctcccacctcagcctccagagaagctagcactgcagatgcatgccaccacaagggtaactttgtattttttgtagcgacaggatctcacgatgttgcccaggctagtcttgaactcctggcctcaagcaatcctgccatctcggcctccccaaatgctgggattacaggcatgagccgtgacaccggccaagttctattctgaagatgaggaagctaagttatgaagagattaagttaattagccaaaggtcttgtcactgacatggaaaagctagaattgaacctattctttaaattagagctggggataagaagtacacatttctcagggcctgtgaagaggggaagtcagtctgttccagaaagggaggaagagctggattgaaaacaagagacacattctagctagcaccaatggagtgagcccagaactagaaatatgctgtctctatgggtttaggaggaatcacccagtgtcagagaattagggatacaccttatgagtttggccaaactggctgtagtatttctgtgttttttagtagacgtgttaatacgaaagagtgtgtcacattcaaatattaaattgggccaggcacagtgcctcacacctgtaattccaaaatttggggaggccgtgacaggaggatcactggagtccaggagttcaagaccagcctgggcaacaaagtgaaaccttatctctacaaaaaaattaaaaaattagctagacatggctgcatgtgcctgtagtaccagctactcaagaggctgaggtgggaggatcacttgagcccaggaggttgaggctgcagtgagcagtaattgtgccactgccctccagcctgagtgacagagtgagaccttgtcccaaaaaattaaattaaattaaattaaacgctttgcaaaaaaaaaaaactacccattaaatccgggttcctgggttatattagaagttccggccgggtgcagtggctcatgcctataatcccagcactttgggaggctgaggtgggtggatcacgaggtcaggagtttgagaccagcctgaccaacatagtgaaaccccgtctctactaaaaatacaaaaaattacccgggcgtggtggcacatgcctgtaatcccagctactcaggaggctgaggcaggagaattgcttgaatccaggaggcgaaggttgcagtgagccgagattgggccatggcactctagcctgggtgacagagcgagactctgtctcaaaaaaacaataaaaaaaagaagaagaagttctagggcacttaactactaatatctgggggggcattctttgcctcccctataaaatgtaaagggatcccaaatgttaaacttccacccccatcacctcgagttgtcatggaaaagagaatgttataccctgtttataccccacgtgtcctggggtgtagctagtgctttctagctgatcatgattctgaagataccttggaataggctgggaaacaggtaaaaatcagactgtgtgagtttgaaagagtgcaggaaaggtggcttctgggttatatccaagatgtgtcattgtggttccccgtggtgatcagaaaagcgagccagcttgctgtagtttggttgaccaatgtccatgcattctgaaattaaaataagctttgtgattactccttcactttatttagtagtagtcattgtgtaaatttgaaacaaccggagaagttgggcttagtgttgtttttatacatggcatattctagaccctgagggccaggtcagggtgaggtgagggagacacctcacctcctttaaacattatttaaaatgttgacattttgttcaccgtggattttttttgcattcattttggttttttaaaatattgcattaggccgggtgtggtggctcactcctgtaatcccagcactttgggaagccgaggcaggtggatcatttgaagtcaggagttcgacaccagcctggccaacatggtgaaaccctgtgtctactaaaaatacaaaaattagctgggtgtggtgtgcgtgtgtggtcccagctactcgagaggctgaggcaggataattgctttaaccggggagacagatgttgcagtgagtcaagatcgtgccactgcactccagcctgggcgacaagagtgacactccatctaaaaaaaaaaaaaaaaaaaaaaaagcataaacgtaatttatcttgattgctgaattttttgatggccccttacattgggtgctcaaagtgactgccttatctccccacaaaggaaaaacaaaacgcttgcatttttccctcaaaagactaaaaaatagaagccatcattaatttaaaataggattaagtgccaaaagttcagtgagaacacagcaggtctgggggtgtcaactctccatgccccaggtgtggaaacagtccccctctgcctgctagctttggccagccccctcccccgggaccctgtcctcatctccccccattaatcagccttcactttctgaagtctcacacctcctgcattcctcactgtttgccaagccttgataatggtcccctctgtgattggtatccccaaggcaggaccagagcccagagaggtgattaaggggcaggagatcccaggcttcagggacctgctccctgagttccttggagcccagtgttgtagtcctaattgctagagaccaaggccagcttgaaagatgtgatctgtgtccttcacttcttttgttcttttcttccccggtgctggcctaacctccttgcatgtggataaaaattcaatcccctcctcatggaggttgtccctcttgtttcacccccaaaatcctccagtttctgtctgccaagcagctagaaggagctttttttttttttttttttttttgagatggaatctagctctgtctcccagcctggagtgcagtggtgctatctcggctcactgcagcctctgcctcccgggttcaagcgatttttctgcctcagcttcccaagtagctgggattgcaggcacatgccaccacacccaactattttttgtatttttagtagagacggggtttcgccatgttagccagactggtctcggactcctgatttcaggtgatactaccacctcggcctcccaaggtgccgggattacaggtgtgagccaccacatccagccagaaggatctttctaaagggaaactctgaaaaatcatccctctacttaaaccttctgtttctcttaggatacagtatagactctagtgtgatcatcagggctgcgtggccaggtctatacttcatccccaaattcattctttgaccctatagcccaatgggctccctgctgtcccggcagtaaaccaagcacacccggaccccaggaaccttgcatctactcttttttttttcttcagagattggggcatgaaatcttccattcctctttgcattgctggtttgcattattgggggtattagaagacactggcttttggcaagaggagtctagattccaggtttggtgctaactgacaaagtatcttgcggcaggtagaaataatcagttttcttgcattttttccctcgaaagactaaaaaatggaagccatcattaatttaaaacaggattaagtgccaaaagttcagtgaaaacacagccacatctgtgttttctctgtgttagtatctcacacacaattccactccaaatacatccctgatgctgatgaaacgttatgtatataattgtatgttgtctacaaggtaaaccttaaaagtatgacaaatagaggttactatatgttcattgaatgtctttttttttttttgagagagagagagagagagaaataagatctcactctgtcacccatgctggagtgcagtggcatgatctcagctcactgcaaccttcacctcccaggttcaaacaattctcctgtgtcagactccctggaattacaggcgtgccaccatgcctggctaaattttttttgtgtttttagtacagacagggtttcgccatgttgcccaggatggtttcaaactcctggcctcaagtgacctgcccaccttggcctcccaaagttctggggttacaggcatgagccaccacgcctggccccttgcatctactcttgcttttgcctgtaatacccttcccccacctgctcgcacactcccttcggtcttcctgagggtcacctcctcagaaagctctttcctgacttctccacactcggtcaccacccctattacaagccctcatagcaactcacttaggtccctcagagcttttatcacaagttcccatatatattaattggtgcaattatttgtttatttatgtcttcctctttctagggcagacattgagatcgggatgtcttatctaattggttcaaccctgtcttcccagtggtgcctagaaaaatgcctggtacacagtaggtgctcaataaatgctttttgagtgaatacagcagggtttgtcattctgcgcccggctgacatttggggacagtggtgggggctgttctgtgcattgtaggatgttgagcagcgtcactgactttgacatactaggtgctgtaacatacatatcctctgcctcgtttcaaagaccaaaaattgtctctagaaatttccaaatgtgccctgggaaggggagcaaaatcaccattggcagagaagcatgggaatgcagagactgggctaatagagctccagctgcgtcttacccctcttggctcccttagaactttgctcatgggatggttcgttttatgtgtcaccttgactgggtcaaagggatgctcagagatctgattggatattatttctgggtatgtttatgaaggtgtttctggaagagatgaacatttggattggtgaactgagtaaaacaggtgggccttcccagtgtgagagggcatcctctaatctgtggagggtccgaatagaagaaaacagcagaggaggttggactcacattccctttgcctggcaatcttcttgctcttactgctcctggttctcaggccttcagacccaggttggactctacaccattcgttttcagctattggccgagtcaacactgtctttcctggttctcaccttgcacatggcatatcatgagacttttcagcctccataattatgtgagccaataccatatatatacatatatatataattttttttttagatggagtctcactctgtcacccaggctgcagtgcagtggcatactcttggctcactgcaacctccatctccccggttcaagtgattctcctgcctcagcctcctgagcagctgggattacaggcacccgccaccacgccccgctaatttttgtattttaagtggagatggggtttcgccatgttggccagactggtctgaaactcctgacctcaagtgatccacccactttggcctcccaaagtgctgggattacaggcgtgagccactgcacccggcccttataatatatatatatccatctaccttatctatctacctattcgttacctatttatcatctatctatctgtctatatcttattggttctgtttctatgaagagccctgactaatacaatccgtatcttggtcacagccctgatatttctctgtgtatcactgcaccaggtaacatgcaaatgcctcaaaagctgggaacagaaacaaacgcttgtctatatccccaaaattagcacaagtctggagacaaagaaggccacaaataattattaaactaatcttagcccaggtatggtggcttacgcctgtcctttattggttgggcgtggtggctcatgcctgtaatcccagcacttttggaggtcaaggcaggcagactgcttgagctggggatttcaagaccaaccttggcaacatggtgaaaccctgtctctacaaaaaatttcaaaaattagccagctgtggtggcacatgcctgtggtcctagattctcaagaagctgaggtgggagaattgcttgaggttgcagtgagccatgattgcaccactgcactccagcctgggcaacagagcaagaccctgtctcaaaaaaaacgaaacaaaacaaaaacaaatgacaacaaaaaacccaccaagcctgtcctttattaatgggtatatctaatgactttctgatattcaagcagaaacctttaggcagtgagagagaagccatgtggacatcttgtggggagaagggaattcctggtagtgggcacagcatgtgcaaaggtcctgaggtaggagcatatttggtgtgtttgagggacagtggggaggctagagcagagtgactgagggaaggagaaaagggaggtgaggtcagagaagcagcagcagggcccagatgtgtagggctttgttggcactgtaaaaacttcggatttctgtagtcccagcactttgggaggccgaggcgggcggatcacgaggtcaggagatcgagaccatcctggctaaaacggtgaaaccccgtctctactaaaaatacaaaaaattagccgggcgtagtggcgggcgcctgtagtcccagctacttgggaggctgaggcaggagaatggcgtgaacccgggaggcggagcttgcagtgagccgagatcccgccactgcactccagcctgggcaacagagcgagactccgtctcaaaaaaaaaaaaaacaaaacttcggatttccctgtaagtgagacggagtcattggaaggttcttagtagaggagatataatacaatgtacacctcctaggctcaagcaattctcaggcctcagcctccggagtagctgggattacaggcacacgccaccacgcctggctaacttttgtatttttagtagaaacagggtttcactatggtggccaggctggtcttgaactcctgacctcaagtgatccacctgcctcagcctcccaaagtgctttttcaatcataaatgtcactgctctaaacatccttttgtttacactgacatggaatgtctataagatgtcaatcaaattggtggaaattaggaggcaggatttcaacccaggtccttctcactcaaacacgactccccacacacacttacccactgccctggggggtaatgaggtttctttctcacaggaaatacataagtcaacattctggattgttcagtgttgtaggattaaattagtccactttaggaatatttgttaagaattgatatatcgtccaagtgccatgctgatgctggatgtgataatgtacgagatgatcaaacctcatgaccacatgcagctggcagcttaaaggatcacaataagttagcataagacatccagtgcccaactcatagtggatatccagcctctttccagggtctctatccatttggataccagcaggatcagaggccagtggggtcttttataaagaaaagaaaagaaaaaaagaaaaaaaagagagaaaagaagggaagggaagggaagggaggggagggaagggaacggaaaggaaaggagaaaagaaaggaatggaagggaagggaagggggagggaaggagaagggaagggaaagaggagggaaaggaaagggggagggagggagaagggggagggaagggggagggaaggagaagggaagggggagggaagggggagggaaggagaggcgaaggagaaaggaaggtgaagggaagggaaaagaaaagaaaaaaaagaaaagaaaagagaaaagacctgacttatgttcccgcccagatggctctgttgtcaggagaggggagcatcttagctcagtgcatagaagttactcaagaatttctacaagactaaaacttattttaaaatcatgaaggactgttgaatttgtagaaatattccatctgtgttccaaggatgcacgcttcagggtttgcagagggttgcaactgtcttcctgtgccacaaaagactctaaagatgctgagatgtttcatttgaagaaggaccagtcctccagaaattaggatcccactgtaaaaaggcaatgcttgaagtgttgaatggagaagacttggaatcagaaaagactgacattgaagcttggctcttccaagttggttggtctctgatgagccatgcatgttttgtgcctcagtttccccctctatcaaacagagggactgtgattatatctgctctcactcccaccttgtgaggcgctaatgatacaacatgcctggtgggtaacaagatgcatgaactgtagcacatattctgcaaagggagcttctctgagtttccaagttttgattgaaatcgtttcccacatcctcacttttcatgctaatgtgggatttttttttaaattttatcattattatactttaagttttagggtacatgtgcacaacgtgcaagtttgttacatatgtatacatgtgccatgttggtgtgctgcacccattaagtcatcatttagcattaggtatatctcctaaagctgtccctccccccattcccccaccccacaacagtccctggtgtgtgatgttccccttcctgtgtccatgtgttctcattgttcaattcccacctatgagtgagaacatgtggtgtttggttttttgtccttgcgatagtttgctgagaatgatggtttccagcttcatccatgtccctacaaaggacatgaactcatcattttttatggctgcatagtattccatggtgtatatgtgccacattttcttaatccagtctatcattgttggacatttgggttggttccaagtctttgctactgtgaatagtgctgcagtaaacatgtgtgcatgtgtctttatagcagcatgatttataatcctttgggtatatacccagtaatgggatggctgggtcaaatgatatttctagttctagatccctgaggaatcgccacactgactcccacaatggggaactagtttacagtcccaccaacagtgtaaaagtgttcctatttctccacatcctctccagcacctgttgtttcctgactttttagtgattgccattctaactggtgtgagatgatatctcattgtggtttccatttgcatttctctgatggccagtgatgacgagcattttttcatatgttttttggctgcataaatgtcttcttttgagaagtgtctgttcatatcctttgcccactttttgatgggattgtttgtttttttcttgtaaatttgtttgagttcattgtagattctggatattagccctttgtcagatgagtagattgcaaaaattttctcccattctgtaggttgcctgttcactctgatggtagtttcttttgctgtgcagaagctctttagtttaattagatcccatttgtcaattttggcttttgtaatatgggatgttttgactgtgggttgttttgactgcttgaatgatggagaattcacactttagaaaaaaatgatgcatagctcaaacacaggaagacctattgtcaataaatatataaatactatacagtagggtcaatcttaaatccctgcccattgggaagagaccatgaggtaaactttcttttttttttttttttttttttttgagatggagtctcagtctgtcacccaggctggagtgcagtggtgtgatctcagctcactgcaacctctgcctccatggttcaagctattctcctgtctcagcctcctgagtagctgggattacaggcacctgccaccacgcctggctaatttttatatttttagtagagatggggtttcagccatttgcccaggctgctcttgaactcctgacctcaggggatccacccaccttggcctcccaaagtgctgggattacaggcatgagccactgcgcctggccatgagataaactcatcctggggtctacactcaatgtccagattcaacagagagctcctggctggcccatgagccgtgtcaacttctaacacagcattcggtatctcacagtgtgacttttttccttgatccaaccatgaagacatctcagtctctccacaactattcaagactcacacttgaaattctaaggtttccttgatgtttaaagagagtctgtttattgctatttctaacttctattgcatagatctgtgcaatgctgaaatttagggtacttttctctcctctgctataatctggagtagccttacaaaatctgagttgtagctacctggtgcggcactcatagagagtggggcatgaaatcttccctctctctttgcattgctggtttgcattattgggggtattagatgaccctggcttttggcaagaggagtctagatggaggtttggtgctaactgacacagtttcttgcagcagatagaaataatcaaacctggttttctctgtgttagtatctcacacacacttccactccaaatacatccctgatgctgattaacctttgtgtttataattgtatgtcgtctacaaggtcccttgtaaaccttaaagcatgacaaatagaggttactatatgttcatggattgtctttcttttaggggggaagggatagggtctcactctgtcatccatgctagactgcagtggcacagtcatagttcactgtaagctcaaacttctggacttaggcagtaatcccagttcagtctcccaggtagctgggactacaggcatgtaccaccatgccaagctatttttttctaagtttttgtagatatgcagtcttgctatgttgtcaagtctagtcttgaactcctggcctcaagcaatcctcctgccttggcatcccaaggtgctggaattataagtgtgagccacagtgcttggctggaacgtaattttctttttttctttctttctttcttctttgagacagtctcactctgtcgcccaggctggagtgcagtggtgtgatctcagctcactgcaacctccacctaccgggtcaagcgattcttatgcctcagcctcccaagtagctagggttacaggcatgtgccaacatgcctggctaatttttgtatttttagtagagatggggtttcgccatgttagccatgctggtctcaaactcctgacctcaggtgatccgcctgcctcggcctcccaaagtgctgggattacaggcatgagtcaccacggaacgtaatttttaacaatagccttcggtaatccaatttagttgttcccagtgaatttctcctacatcattacatttttttctgggtagagtttactgaagaaggtcttcttcatggcgaccttcagctccttgttcctgaggctgaagatgatggggctgaggaagggtgtgaggaccgtgtaggtgatgcccatcaaggtgtctccttccagagactggggacttttgggcttcaggtaaatgacggaggcaaagccatagtgcacgaccaccacagtgaggtgagaggcacaggtggagaaggccttgttccgaccttcagcagaagggatcttcaagatggcggccacgatgaaggcataggagaggaggatgaggagaaaacagcccagcagggccgtgatacacaccaagcccacgcctttggccaccaccagcacatcgtctccacaggccaacttcaacagaggtggcacatggcaagcaaaatggtggatctccttgtgtccacagaaggcgaggtggaaaatggccgaggtcaccaccatccccatgaccaagccaccagcccaggagcagcccaccaggcaggcgcagccccgcgggctcatgagcacgttgtagcgcagggggtggcagatggccacgtagcggtcgtagcccatgacggtgagcaggaaggagtgggtgaagccgaagctgaaggagaagaacatctgactggcacaggccaggaaggcgatggagcgctgggtggacagcaggtcggccagcatgcgcgggatgatggccacggtgtagaggatctcggagacggagagggcgcacaggaagaggtacatgggcgtgtggaggctgcgctcgctccagacggtggccatgatgagcaggttgcccagcagcgtgaacaggtacatcagcaggaacagcaggaagagcatcagctggaggtgggggaagacagagaagccgacgaggatgaattgggtcactgtggagtgattggctctctgcatggaggctgtgcctggggtgagatgtgacagggagatgtcagttactgcatgaagaaaagttctcagccttccccatacctggatttgcccaagggactgctcttgataaatggtttggttccattcccactctgtacctcctataatttaatactctcgtcaacctagtgagaacggtactattttttcaacccccttttgaagtaccttgagcatagtcattgagaatattgaaatgtagagcttgctcaaggccaagctgttgaaacggtagatcagagactggaacccatagctgggctggctctaaaacctgtacccttcactatttctctatgttgccccctgcccccaaacgaaaatgctccaggctggcatggtggttcacatctgtaatcccagcactttggaggctaagggggaaggacggcttgagcccaagagtttgaggttgcagcaagctatgatggcaccactgtactccagcctgggtgacagagctagactctatctcttaaagaaagaagaaaatggccgggcacggtggctcacgcctataatcccaacactttgggaggctgaggcaggcggatcacgaggtcaagagatggaggccagcctggccaaaatggtgaaaccccatctctactaaaaatataaaaattagtcgggcatggtggcacgcacctgtagtcccagctcttcgggaggcagagacaggagaatctcttgaacctgggaggcggaggttgcagtaagccgagatggcgccactggactccaccctggcgacagagcgagtctctgtctcaaaaaaaaaaaaaataaataaataaaaagaagaagaagaaaaacatattcctttgctggaacttccattcattccttctctgccctcctactcccttctgataaatcacgttcatcccccagctccaggtatcatgagacgttcccacccatggctgcaactccttggaacagggcgcgtctctaaatctgaaccaaccagacttcctctggggttatccatgtaggaaagcagaggcaggagactgtgttgctctaaggaaggagccagaaatcatgctttggttgttttccagctcccatgaggtatgcctctatgttctgaggcaatgaaatgtagccatcagacagaaagaagggcgtgggaatcagcagggctcagttcaaatccctcctctggctgttgtgtaatgattatttatttatttatttatttatgtatttatttatttatttttgtagagacagagtttcattctgttccccagactggagtgcaatggtgcaatcatagttcactgcaacctcaaactcctggattcaagcaatcttcctacctcagcctcccaagtagctgggactacaggcacacaccacctcacccagctaatgttttattttttattatagagatggcatcttgctatgttgcccaggctggtctggaactccacccctcaagtcatcctcctgcctgggattcccaaagtgctggaattacagaagtgagccactgcatctggccaatattttgtaaagttgagcagattcctttatctctctgtacctccctacctcaaagggttgttgtgggaaggaaatgagcttttcttaagtgacctggcatgcagtagatgctacatatgataattaatacagtaaatgagtgactgtacatggtctttgctcagtaactttaatttcatgagatttctatgtgtctttatgaaacaattaaatatattcaattttttttttttcaaaagacagggtctggctctgtcacccaggctggagtgcagtggcacaattatcatagctcactgcagccttcggctcctgggcttaagcgatcttcccttctcagcccccttaaatagctgggactacaggcatgcaccaccatgcttagttaatctcttttttaaaaaatttggcaatgtgtgaccaggtgcagtggctcacgcctataatcccagcactttgggaggccaaggtgggcagatcacttgagatcaggagttcgagaccagcctgggcaacatggtgaaaccctgcctctactaaaaatacaaaaattagccaggcatggtggcacaggcctgtggtcccagctactcaagaggctgagttaggagaatcgcttgatctgggagatggaggttgcagtgagccaagatcacaccactgcactccaggctgggtgacagagcaagactccttctcaaaaaaaaaaaaaaaaaaaggagtaaactaccactctgctttctgtttctacggatgtgtctgttctgaacattttacataaatggaatcatacgagatggggccttttgtgtctcatttctttcactgaacataatgttttagggttcatttgcattgtagcatgcaattgtaacagtattaaaacaccacagcatgcgtctgagctttattcctgtttatggctgaacgattttccattttatgaatatgcgtcatcttttcatggacatgagggttgtgccccacctgttggccttcgtgaacaatgctgcaatgaaaatgcttgtagcatttggaacctatcagtggtttccaggggctggggtgaggggagaatggggagtgactgctaatagatacggtgtttccttttgggctaataaaaaattattacctttgtctggaactaggcaaaggtggtgttagtgcaacagcataaatgttcttgatgccactgaattgtatacttttaagtgtttatgtggaaatccagtaataaaaggcaaatgcagtgggctttctcaaaaataaaataaaataaaaataaagaaataaaataaaataaaaataaagaaaagaaaataaataaataaataggtaaatttcaggttgtatgtatgttattacaataaaaagatcattttagaaagggtagttcacttccctttaagtgggctcaggtcctcagtcaagccctggcagatttatagtgagagatgaaggaagaaccagctcctttggtgagcagaggctgcattctccaaacatcgttggtctccagagtttcttggtctctcttcctggaatcactctcgttttgccccacttctgggtcagtacttgcccgtagctccacagaatagtggcccccacagcaccaccatgtcccgccactctgagatcttagaggagtaaatgacttggaaacaagaacctccaagaagaggccaaatgggcgagattggtgccctggggtggtgctcacaaaccctctgtggctccccagtgcctaaggcagggtttctcaaccttgggactgttgatatttagggccaggtcattctttctgtggggagctgttctgtgtctcataacatgtttagtagcatccctggtctctgtcaactcaatgccagcagccattgctcagtcatgacaaccaaaaaatgtctccagaaaacacccatgtctccatggggctcaaagtcacccccagttgagaaccgctgatccagagagtgcagccgcaactccttcacaccctccctctgctgggatccccattcctccacttcttcacctggcaaacccctgtttgttgttaagattcagcttagatgtcacctcttccatgcagtcctcctggatatttcttcccaaggcatattaagccacccattcctgggtgctttcaaaataatgattcccagttaatggtaacagcaggcattggttcaattctcgctctgtgcctcctacaagtaactttaaagctccttgctcatgactttgttatgatgtttgccgtgatatgtcatgttggagctgtgtctatccctggaacctgattgtgaatccctgaagccaaggactgttgtgtctacagcaccagtgctgtgtactcaacaacaacaccgatgagagcagctgccctttactggatatgtcctacagaccaggcactgcactcacatcactcatgctattcttattgaatatttacccccacattagaagtcatctgctctgatccctattttacagacagggaaactgaaacccacgacacatcacttgccttaggtgccttgagtctgaagtgggggcccagggtctgagcttaggtctgattgatctcaaagcctgtcttttcctaacctcttgttatactcaccagttgctggtggctgtttcaaaggccactaggagatgctgcttccccatgactgaccgtctacacactcttgttcatatcaattcagatcacaagaatcgacagcgagtgagtgaacaaggtggggggagagagagagagagaaaaggaggaggaggaggaggaggaaaagaaagaaaaaagggaggaagaaagagagggagggagggaggaaggaaagaaggataaaaggaaggaaggatggggactgcaggaggaaggaaggagggagggagggaaggaggaaggaaggaacgaaggaaggaaggaaggagagtgagggaggaaaggaggagagtgaggaaggaagaaaggagggagggaggcaggaaggaaggagagtgagggaggaaagaaggagagtgaggaaggaaggaagaaagggagggagggaggcaggaaggaaggaaggagagtgagggaggaaagaaggagagtgagataggaagaaacgagggagggaggaatggagggaggaaggaagggagggagggagaaaccttgagaggacaggagccgatcacgtctgtaggaggtagctgagggctgcatgtaacaccgtctggaatgatgggatgcagaatgcagctaaaagggtagtccagtcattctggaaaaatcaaaaccatggagacagcaaaagatcagtggcttccaggggaccagtgggtgagagggagggatgaatgggtggggcacagagggtttttaagacagtgtaactatgttgtgtgatactgtcatggtagatacaggacattgtgcatttgtcaaaacccagagaatgtacagccccaagagtgaactctaatgtaactgtggatttcagtcaatgacaatgtgtcaacactggttcatcagttgtaacagattaatggtaaaaaaaaaaaaaaatcccagttgctaattataggggaaattgtgtgcaggcggagagagggtatatggagattctctgcagtatctatctgctctatgttctgtaaatctgaaactgctcttaaaataaagtctattaattttaaaaagtaaaacaaaaccaaacccatggtggatgtgggactaggatagcagcgaggaggatttagagcttctgggcattgattcaccagcagaacatccagtgggttcctctgtaggtaaaacagagagagagaaaggtaggaagagaaagagagagatggggatagagagagaggcaggggaagagagagagagagagagagagagaggaggcgagggagaaacagagagagagaggtggggagagaaagaaagagaggtggggagagagaaagagagagacagagaggtggagacacagagagatgtggggaaagagcacacacagagagagagagagatggagggagagagagaagtggggagatagagagtgggaggtggggggagagagagagagaaggacagggagaaagacacagagagaggtggggagagagaagtggggagagagacacagagagtgtgggaggtggggagagagagggttggggaaagagagagagagacagagagaagggtggggagagagagagaagtggagagagagggaggtgggaagagaaacagagagaggaaagagaggtagggagaaagagaggacagaggggaaagagaagaaaaaggtgagaagaaagagagagagcaagcaagcccactgtctagcactgacaggaacacccggtggggccagttctccactcagagactctagggctaagcgtggctgtggacaagtcctgccacagacatccctagagcagggtttcctgccttcagcattagggacgctaggggcgaatcattctctctcagaggggtgtcctgtgcactgcaggagactgagcagcattcttggtctccacccaccagatagataccagcagcactccccagtcacgacaatcagaaatgtccttatacgttgtcacgtgtctcctgggtgacagcatcactccatgggccaggcctgtcttgtctctgagaccccatctggccttaactctcacccatcctggctctctcttcttagtgaagctgtctggcctcccctctcttccacttaagccaccacttccctctcttttctctccatcttctcatccccagctcctaaccattccctcaccacctgctcccattgacgcctcccttgtgtgtgtgtgtgtgtgtgtgtgtgtgtgtgtgtgagagagagagagagagagagagagagagagagagagagagagagagagagagacagggtatccctctgtcacccaggctggagtgcagaggcacaatcacagctcactgcagccttaacttcctgggctcaagcaatcctcccacctcaatctctggagtagctacaggtgcctgccattcctggccaatttttgtatttttttgtacagacagggtctcactatgctgcccaggctggcctcaaactcttggactcaagtgatcctcccaccttggcctcccaaagtgctgggattgcaggcatgagccactgcacccggcccaccctgattctttacaccctggggtggtggctggagcttctgaaccctgaatcctctttctctcttttctccgcctcttcccaatcctttttccgtagacttcttgcctggacagaccgagaagagaggttaaaatcaaaccatcaccttgggtcacattgagcattggctgtcttctctctgcacctgttacctcccccatccaagggacctacctcatgaggcagcaggagctctaaagaaggcaagtcctggctgggcacgatggctcatgcctgtaatcccagtactttgggaagccgaggcgggtggatcacgagatcaggagttcaagaccagcctgtccagcatggtgaaacccctgtctctactaaaaatacaaaaaattagccaggcatggtggcacgcacctgtagtcccagctactcaggaggctgagggagaagaatcgcttgaacctggcaggcggaggttgcagtgagccgagattgcgccactgcactccagcctgggctacagagcgagattccgtctcaaaaaaaaaaaaaaaaaaatagaagaaggtaagtcctgctaagcaaacagcacactgactaagacgtggtgagtggcctctgcctgtcacccactgccctgtagactcacattgctaaaggagtaatataaacaggtggtttcttggagtccctggcaggtgctggttccccaggtctctcctggtcaggtggctgagaggggaggtgactcacctgggactccaggcatctgcttctgcttcatcccagtaggaggctctagtttggagtttctccacaggtgggagctgaccaggtgtgggctgcaccaagcagccacaccagctgagccgggggcttgactgagcccaaatgcgattatttatccctccctgactccctgcccaccggcttccctcgctgtggtcctactgtctctgtctccgctacagggatgctgggaccccagggaccctgccagagaggaggcaacctcagggaatctgtatcctcactttcccattccccccgcctgccaggggtgagtcaattccctgagcttgtcaagagcttgagcagagtctagtgctctacagatttggggtttgggcccatgactgttgaaattgacaggagggcagccctgccattgcccccagggactgcagaggctgccttgatatgccccgtcaccttcattcttctccaactgggtcatttgcccaactaaatgtcctttaaaataattttttaaaaccaacacacacacacgtatttgtttttatttttattttttgagacagggtctagctctgttgcccaggctggagtgcagtggtgtgattatggctcactgcagcctcaacctcccaggctcaaatgattctcctgcctcagcctcctgagcagctgggagtaaaggtgcttgccaccacacctgggctaagttttaatttttctgtagagatggggtctcgctttgttgcccaggctggtcttgagctccttggctcaagggatcctcccaccttgacctctcaaagtgctgggattacagctgtgagccaccatgcctggcctgtttcttcttattatgtaattgaaatgctacatacaaagcagcaaaccatgcaatggccagccaggcaatcgtgacggtgaatttaatgggtatcccttcagatcttcatgagcatgtaggatgtgaaaacaatgcaaacccataaaatcagagttctgttgtgcattattgttgctttcgcttcgttctgcttttgaggtgaaattcacataaaataatcaaccactttaaagtatacaattccctgggattgaatgcattcacaatgttgtgtggccgccgcctctgtctagttccaaaatgttttcatcacctaatacccattagcagccactcccctaccccacccagtccttcaaaaccaccaatttgttttctggctctggctctatggacttacctattctagacatttcatataaatgggactatatactactatatataacgatgcattatgattgcccctgtgagtagccacggcactccagccattttgtcaacacaaaaatgtcgacattgccaagactgagaaactttggtctgcataaactcacacagagttcactctaagacgctgagtgaaaaaccaagttacggaaagatatctacgggagaatcagatctgcattttaaaaacacacaaaatggtttgacagtttatcaaaaagttaacatagaaattatcaaaggactcagcaatttcactcctaggtatacacccaaaagaatggaaaaggattcaaacaaatccttggacatcaaatgtgcatagcagcactgttcacagtagccaaacggtattttttaatttttctgtagagagtaggatttcactttgtttctcaggctgctcttggaactcctgggcttaagcgattctcctgccttgacctcccaaagtgcttggattgcaggtgtgagccactggacatggcctgatccaaacgtctatcaatggcagatccaaatgtctattaataaataaatggataaacaaagtgtggtataatcatataatggctattattcagccacagaaaggaataacatcccagtccaggccacagtagagatgaacgttgaaaacatgtgctatgtgaaaggagctaggcttttaattttatggataattccatacaaatgatatctctttgatacactgatttcttttctttggagtatatacttaagtagtggcatttctggatcatatgatagctctatgtttagttttctgagaaaccgccatactattatccatagtggttgtattaatttactttcccaccaaaaaatcatgagggttcccttttctcagcatcctcccaggcattccttattgcctgtcttctggataaatgccatcttaactgggttgagacattatcttgtagtgttgatttgcatttctctcatgatcagtgaggttgagcatcttttaatatgcctgtttgccatgtgtatgtcttcttttcagaaatgtttattcagatctttggcccattttaaaatcagatcattaatttttttcctattgagttgtttgagccccttatgtatcctggttattaatcccctatcagatggatagtttgcaagtattttctcccattctgtgattgtctcttcactttgtttattttttatttacttttatttttttttattttttatttttgagatggagtctcgctctgtcgaccaggctggagcacagtggctcaatcttggctcaatgcaacctccacctcccgggttccagcaattctcctgcctcagcctcctgagtagctgggattatgggcacacgccaccatgcccagctagttttctgtatttttagtagaaatggagtttcaccatgttggccaggctggtctcgaacccctgacctcaggtgatcagcccacctcggccttccagagtgctgggattacaggcgtgagccaccacgcccagcccactttgtttattgtttcctttgctgtgcaggttgtaacgtgatgtgatcccagttacccatttttgctctcgttgtctatgcccgtagtcaagaaatttttgcccagaccaatgtcctggagagtttccctaatgttttattttagtagtttcatagtttggggtcttagatttaagtctttaatccattttgactttatttttttatgtggtgagagataggggtctagtttcattcttctgtacatggatatctggttttcccaggaccatttactgaagacagtgtcatttccccagtgtatgttcttggcatctttgtcttggaggaatttagatacactggagggacccgcagaaataagatatggcagcacgtatacaaattaaagccttaaaatttttggagagatttttcaaaatttggaatgatataaatataatgaagaactttgaacttagccatttctaacttatctgttccaggagcacataaacagactaatcgggattataaaacatgctcacactaagtaactaatatgcagacatttatggagcgacaactgtgtgcctggcaccaaggtacaaagataaatgaagctggaaaccttctcctgtggagtacacagtggcaggaaagacacaaatattaaagttaaaattatgtcacggtggcagggcacggtggctcacgcctgtaatcccagcactttgggaggccgaggcggatggatcatgaggtccggagttcgagaccagcctggccaacatggtgaaaccccgtttctactaaaaatacaaaaattagctgggcgcggtggcaggcacctgtaatcccagctacctgggaggctgaggcaggagaatcgcttgaacccaggaggcagaggttgcagtgagccaagatcgcaccactgcactctagcctgggtgatagagttagacttcatctcaaaaaaaaaaaaaatatgtcatggtgtgatcgatgttgagctagcaaggaggggtggcaggaccaggaaaagtccatcaaaattggtgatgggagtcataaggatgagtagacttcagccagtcagaagatcagagaaaaggtgctacaagtagacagaacagagtcttgaagatggcttcagagggatatggtggaacgagcctgaatgcagtctagtaagccagggacatgaggcaaggagaggacaaagatggaagagggtctggagaggtggccaaggacagcttaaggagacttggagggtggtcgaaggagctgtggcttcctcttgatgtctggagagtcaccagagggtttaaatccttgtaatcccagcactttgggaggccgaggcaggaggatcacttgaggccaggagttcaagaccagtctgggaaacataatgagacccccccatctctaccaacaattatttacaaattaaaaataaataaataaatcctatgagtgacatgttcagccacctgagggaggatgggatcgggggaggtgatgactgaacagcttcaaccaactcagaacagccagttgtcaacttctgaaaattgttgcaacctggttgttaaacacagctctgattaaaagtaaactgtatgaaattacagtgaaataaattaagggaatctaggagtgagctctgtcttctcacttctgtcatgattgaaaggttcatctatgactcttagcgttattttcagcacctaccaattgatggcaggtcttctgtaaatacagattataaggagattgattcttctatctgaaagtctcagaagttcttagagacaaataattttcttaaagattaagcaggtgagaaagtaatgaactctagaagcttaaagctgtaataactgcttaaaatgtatcacttcttaattatttcatatatattttaccattgtctgtgcttttgagtttatgactattgcacgtgtactgtggaaatactccatatactagtagcacatcagcaggcttcaacctttttggcaccagggaccagtttcatggaagataatttttccacggactggggttgggggatggttttgggatgattcaggcacatgacatttattgttgtgcactttatttctattattattacattgtaatatataatgaggtaattatacaactcaccatcatgtagaatcagtggaagccctgagcttgttttcctgcaactggactgtcccatctgagggtgatgggagacagtaatagatcatcaggcatgagattcccataaagagcacccaacccagattcctcgtgtgcacagttcacaatagggttcacgctcctataggaatctaataccagcatgccaccattgacccatctgacaggaggcggagctcaagtggtaatgctcaccccaccccaccccttccgccactctcctgctgtgtggcccagatctaacagccacagaccgctaccagctgggcgttttggggaacccctgtcttatgggacacaacaaaaccagtgctgaagaagaaaaataaccttggcgtcttcttcagttgtgagactattgtgaccgtgtctgtgggtgactgagctcttatgtagctgcagggattggagtaactgaggtcactcacactcatgacctgggttctgccactgcttcctccaccatctcacatcacagccgcttgggatctctgttgactcttcgaaagcatgggtggatgtggattcacaaagacattttccagccagaaggctcagagaggggacttaaactggaaaacttaggcctagaaatggccacaagactggcactgaaacggtatgccagtgctcaaggattaggatgcccccaaggaggtatcacttggggaaaaccgttgatgattatctctatggaattacagaaatgccaaatatataacccaagaaacttggtgtgcactcaatgacacagcatgggagggagacctcttacttctatccagatgtttgtgatgtatgggtatctttggccaccgggtgctcctaccatcaaaaagagcttcaagacaggcttgttggggccttgagtccttttaccctagtctttcagctcttgctaagaagaatcccagctaagtgtggtggctcacatctctaaacccagcactttgggaggccaaggcaggcggatcacttgaggccaggagtttgagaccagcctggccaacatggtgaaacaccgtctctaccataaatacaaaaaatagccggccgtggtgacacgcgcttgtaatcccagctatttgggaggctgaggaaggagaatcacttgaacctgggaggcaaaggctgcagtgagctgagatcgtgccactgcactccagcctggatgacaagagtgagaccttgccacacacacacacacacacacacacacacaaaactgaaatgattgtaggtgctcccacagtgcctacacacattgggtttctctccagaatgagatcttccatgtattcgaaatgaactgggagagtcaaaggttttcctacccaccttgcatttgtaaggtccatctccactatgcattttcacatctttgaaggtttgggggggaagtgaatgttttctgaaattcctaacattcatagaggttttctccactgtgaggcctttcgtgtatgtgaaaggagtggtgaaaacgaaaggcattcccacatggcttacatgtatatgccttctgtctacattcctgatattcacagggtttgcgtccaaggcgatctctgatgtgcctttcagtggatggatagcccacgccgacctctccacacacatggctttcaggtggctttactccaggaggcgttttcttattcagattatgacctggaatctggctgaaggcttctccacattgactaccttctttattttcacagggtctctctaccatatgatttctgtacaaaataagtacattattaagtatttttataaataatttatttgttattgatgggtattggatttatgtggagttttttggagacagggtctcactcactctgttgccaggctggagtgcagtggtgcgatctcagctcactgcaacctccgcctcccaggttcaagcgattctcctgcctcagcctcctaagtagctgggattacaggcacccgccaccacacctggctaatttttgtatttttagtagattcggggtttcaccatgttggccaggctggtctcaaactcctgacctcaagtgatccacctgcctcaacctcctggatttatgtttttaacatcatcagtggaagcataggtaggatttctaacctgtttccactgtttggccatgaatggattgaatggtctgcaggagcgcccaactacagctgctatgaaaatagaaatattaacatggggtttcttcttcttttttttttaagacagggtctagctctgtcacccaggctggagtgcaatggcacaatcttggctcactgcaacctctacctcccaggctcaagcaatcctcccacctcagcctcccaagtaagggggacttataggtgtgtgctggcacacctagctaatttttttttttttttggtagagaatagatctccttatgttgcccaggctggtctcaagctcctgacctcaagcaatccacccttcttggcttcccaaagtgctgggattataggtgtgagccactgcacctagcctatatgtggtttcataatagtgtttccatgtaaactttttttgcaaacatatatatgtctcatttaagtatatatttatagagaaagttttctaagaataaacagattgaaactgggcttgtttttagaatttcctgacagtctacgattctcttgatggacactgctttctcttgaaaattaccttaaatttctcccaggattttggtacagatcttcaatgttcttatctccccatttctttcctaaaatgcaggtagagaaaaatcattatgaattattacaaaattattttaaaattattgaattctaggttcatggtacaccatgaccatggtacactggactgcaatggcacaatcttggctcactgccacttctacctcccaggctcaagcaatcctcccacctcagcctcccaagttagggggggctacaagtgtgtgccagcacaccagctaatttttttgcctatatatttatcaaagtatttcttttctacattccaaatcattgagcagctcaattgatgagtaagaaagacttgttctctaaatgactaagaaaagaaatgttgtcacccttaactacagaggccagcatcctgatggtttcccgcatcacatctctgtagagtttcgtctgggaaggacccagcaaagcccactcctgtagggtgaagttgaaagccacatcctcaaaggctggagtcctgaagcatccacatgtgtagaaaaggatggtgagactgacagccctgggtatctgtacttaccacataataagttcacatgattccatgttctccaaacatttcttctatgacttggttatcacacctcttacgctgtgtatacttacttcctctcacatagcaattccgatgctagaattatttggtaaagcaaccatgaaacacaaatacagctctccttggtgggtccagggagtaggatgtactgcctgggtcaccctaatttctcttcacacagtgggtctatagcacctgtcataaaagtcctcctaccacctagtgtgcagaagagacttaacattaggagtcctgaaactctgtatccttagaaatgtttgttcacaaagtttgatctttgataacatatgggatatgaaatttggatgggataccatgaacccaactgataaaagagtcgtataatttcctaaaactgaaaccaataagcaaaaacctctttggaagcagtaaaatttaggaaaacctaaattttaattgacgaattgctggagatagtgtggacaatttgagagttaaaaatgccaggaggcccagacctaaggggtccccactaattagtgacatgcacctccagaaatcctaccagctcttccagtgaagatgagagaaaaactgcttcctgcttttggcagaagatgtgaaagattagccattttgaaatatgcccagagaatgctattcttcttaacatctcctgccttcaaaagaaactatttcccaaagcctaccaactgggatgctggcagagctgacctcctgaagcaagagaaatacccaattccacccacttcaatctccctgccacaactagggaagggtgagaatgagaagtacttaagaaagctacaacccagaaacacaggattccaaaaaatgaggccaaagcataggtcaatggaatgcttccccacaccccacaccttactgccacttcaagagggcttctgtattacaacagcagaaaacaagtgagacagctgcatgccttatgccacatttacgaagtcactacgggcacacatacaagctgaacaacattgatgaagttggcatatttctagaaacacacaacataggactaagtcataaagaaagaaaaaattgggccaggcgcagtggctcatgcctgtaatcccagcacttcgggaggctgaggcaggcggatcacaagtcaggacatcgagactatcctggctaacacggtgaaaccccgtctctactaaaaatacaaaaaaattagctgggcgtggtgtcgggcgcctgtagtcccagctactcgggaggctgaggcaggagaatggcatgaaccctggaggcggagcttgcagtgagccaagatcgcaccactgcactccagcctgggagacagagcaagactccgtctcaaaaaaaagaaagaaaaaattggagcagatctacaactaataaggagattgatgcagtaatcaaaacccctcaactcacaaaagcccagcaccatacagtttcagcgatgaaacagaccaaacacttcaggaagattaacaccaattctcctcaaactcttccaaaaactttaggaggtaggaacatatcctagtttattccttgaggccctgaaattgtgctgacaataaagacaatgatacaatatttgatttgcaaatatcccttatgattattgacgcaacaatcctcaaataaatactccaaggtacaggaatcaaaacagtgtggtactggcctaaagacagagatatacatcactggaatagatacaggggccaagaaagatacccatatatatatggtaaagtgatttttgacaagaatgcttagataatgcaatggaaaaaggctgctctattttaaaaaatggtgctgggaaaactggatagccacatgtgaaaaaataaagttggacccataatttatataacatagaaaaatgaaataaaaatggattaaagacttaaagggaccagctcaaaccaaacaactcttagaagaaagtgttaaacaaaacttatgagaggccactgttttggactgagctcctgcactaggccccagcagaccagaacaaaccaaaatggagtcactcaggctaagtaccacataatcaaactgaacctttaaggaaggaggcaaatcctcaaatgcaccagtttttcctgagagcaggagagtcacagcaaccaataaaaaaaacaaaaataaaacccagccaacctgagctggcataatatataataaggccgcttacaaaaaaggaacctaatgattttttaaattgttctgttttgttgttcctcttacaagaatcacctattccattatacaaagcaggagttcttattctattttatagaatgggatgcttcttcggttcaggaattgcgaataaaagctaagtagatctttaaatttgttttaattttttttaaacctaaggcaaatgtttaacccacccttagccaaaatacaaggccttctttatttccctccgaagaagaggcagaccttaggataaagctttcttctggtctctgtcatctccctgccaaccaccaccaccaccaccatcaccttctctctaatcttgtttgctcctccctgtgaaagaatcattcctaacctttgaggtgttttttctttttctttcttttttttttttttttttttttttttgagactgagtcttgctctatcgcccaggctggaggcagtgacgtcgtgatctcaggtcactccaacctctgcccgccctgggattcaagcaattctcctgcctcagcctcctgagtagctgggattacaggtttctgccaccacgcccagctaatttttgtatttttagtagagacagagttttgccatgttactcaggctggtcttgaactcctgacttcaagtgatctacccgtcttggcctcccaaagagctgggattacaggcgtgagccaccacgcccagctgagatgctttttcaagagtcgccttaacatgaagtcactgtgtgagggtttcggctctcgagtcaagataattcacttacttttaaaagaaaatactcagcgtttgaagaaaccaacaaaatccctcaaactcagtgtccatatagataggcagggaagacaaattgtaaggcgcttgtattttatatagctcaacaagagaagcacaagtatctatccctttcagacaacaaagatgtgccatttaattattatttccatgacaatacacagttgaataaatcattatatttgaatgcttcttggtgttgccaagtcctgacccacagggttttgtattaatctctgaagtccaggtaccaggaaagagaagagttattcaccgtcacaagttctcactctggaaaggagaaaaatggatgttttaatgaatctttgtaatttaccaatttaactatgacactttattgtggaaatgtattcatttcgctgcagccataatggaagagtgattttccttactttgctgagattctcagccccagtagccttctcaaggctaagccctggaattccatttgaaatcacccaaaagaaaagaacaaatatgagaaatgtatcacacgccatctgggtaagacaaaatgtaaattaaaagctttatcggatgatgggtggctcatgcctgtaatccgagcactttgggaggccagccggtggatcatttgaggtcagaagttcgagaccagcctggcaaacatggtgaaacaccatctctactaaaaatacaaaaattagccaggtgtggtggcaggtgcctgtaatcccagctactccggaggctgaggcaggagaatcacttgaacctgggaggcggaggttgcagtgagccgagatggcaccactgtactccaggctgggcaacagatcaagactctgtctcaaaaaaaaaaaaaattaatggatgaaatataaggctagacatttcttttcttttttcttttttttctgaaatacacctctttcttgcctccttggatatattctatcttgtctatcaaactctactaataaaatccatttgatatttaattttttaaaaactgaggttcaggctgggtgcagtggctcacacctgtaatcccagcactttgggagtttgaggcaggaagatcgcttgagcccgggagtttgaggtcagcctaggcaatgtagtgagaccctgactctattataagtaagtaagtgaaaaaaaaattttcaaggtgacaaacccagggaggggtagggcaaactggaataccggcaagtctgactcaagtgtcagatcaggtcatcctatataacctcagacatgccccaaaccctgtgctgctcacatatatactcagtgaccaccctcccagaagacactgcattgtgtgcgtttcagctttttgcgtcacctcagtgaaggtggttttcctgtccttagccatagttttctcccttcactaggctaagaggattcaaaggacagggatcattccagtcttttcccttcaatagcagcatctgagtggctgaccagagaggtatttccaagaagtgaaaactgggcttggggtgagaaaagctaaatgtcctaaggggtttccttttagatgacggagggagataccaggggactcctccctcccgggaggtagggggagggggtgcacccggcggctcccctgagaggccccacaggcacatctcaggctgtcctctgggaagaaatgacccaggagctgatattcatgaccctccaagagacccggcagcttgtgggcatctcagatgagccccaggcagttctgaaacccaggaccaggaaaagataagagggtgggctgaggtcacatcaccctgtaacgtttccaaaagggaactgtcaggcctctgagccgaagctcagccattgtaacccctgtgacctgcacatatatgtccaggtggcctacaggagccaagaagtctggagcagctgaaaaacaaggaagtgaaacagccaattcctgccttaactaattaacccaccttacgacattccaccattatgacgtgttcctgccctgccccaactgatcaatcgaccctgtgacattcttctggacaatgagtcccatcatctctccaccatgcaccttgtgactccctcctctgctgacaacagataaccacctttaactgtaactttccacagcctaccccagccctataaagctgcccctctcctatctcccttcgctgactctcttttcagactcagcccacttgcacccaagtgaattaacagccttgttgctcacacaaagcctgtttaggtggtcttctatacggacatgcttgacacttggtgccaaaatctgggccagggggactccttcgtgagaccggccccctgtcctggccctcattccgtgaagagatccacctgcgacctcgggtcctcagaccagcccaaggaacatctcaccaatttcaaatcgggtaagtggtctcttcactcttttctccagcctctgtcgctaccctccaatctccctgtccagtctttttcttctctagtagagacaaaggagacacattttatccgtggacccaaaactctggcgctggtcacagactcaggaagacagtcttcccttggtgtctaatcactgcggggacgcctgcctaattattcacccacattccactggtgtctgatcaccttggggatgcctgccttggtcattcacccacattcccatggtggcaagtcatttgcggggacgcctgctttggctgctcacccccgcccttctccgtgtctctacttctctctttaaacttacctccttcactttgggcaatcttccgccctccattcctccctcttcccccttagcctgtgtacttaaaaacttctcttaaactaacacctgatataaaactcaaacgtcttattttcttctgcaatactgcttggccgcaatataaacttgacaatggttccaagtggccagaaaacggcacttttgatttctccatcctacaagacctagatcatttttgtcaaaaaatgggcacatggtctgaggtgccttgcgtccaggcattttttacacttcgctccctcccaagcctctgctcccaatgtgactcatcccaaatttttcttctttctctcccgtccgttccttcagtctctaccccaacctcagagtcccctgaatcccccttttctgcagacccctctgacctctctccccctccccaggccactccttggcaggctgaatcaagtcccaattcttcctcagcctccgctcccccatcttataattcttctatcacctcccctcctcaaacttggtcaggcttagtttcattccatgactagctctcccccacctgcccaacaatttcctcatagagaggtggctggagctgagggcacagtaaaggttcatatacctttttctctatcagacctttcccaatcagtcagcgtctgggctctttctcatcagaccccactaaatatacacaggaattccaatatttgactcagtcctacactttaacctgcagtgacctaaatgtcatcctgacctctaccctctccccagatgagcaggaaagagtttataccctagcccaatctcacgctaacacccgccggcatcatgagccagacctccaagaaggcatcagggcagttccctgagaggatccttgatgggaataccagacaggctccccaggtatagctaggcgagattacatggtctcttgcctagctgaagggctgaaaaaggcagcatacaaagctgttaattatgacaagctttaagaagccacccaaggtaaagatgaaaatccagcccagttcatggcccgtttggtggctacccttagaaactttacagccctagaccctgaagggccagaaggccatcttattctcaatatgcattttatcactcagtcagctcctgacattacaaaaaaagcttcaaaaattggaatctggccctcaaaccccacaacaggaattaatcaatctcgccttcaaggtgttcaacaatagagaagaggcagccaagcagcaacgtctttcagagctgcaattgcttgcctctgctgtaagacaaaccccagccatgccttcagcacacaaaaacttcagagcaaccaaaccacagcctctaggcactcctttaaaaccatctcatggaccttgcttcaagtgccgcaaaactggccactgggccaaggaatgcctgcagcccgggattcctcctaagcctgtcccacctgtgcgggaccccactggaaatcggactgtccaactaatatcacagccccttctagggtccctggagctctggctcaaagctctctggctgactccttcccagatctcctcggcttagtggctgaagactgatgctgcccgatcgcctcagaagccccttggaccatcacagatgccgagcttcgggtaactcttacggtggagggtaagtccatcccctttttaatcaatacgggggctacccaccccacattaccttcttttcaagggcctgtttcctttgcccccgtaactgccgtgggtattgacggccaagcttctaaaccccttaaaactccccaactctggtgccaacttggacaacattcttttatgcactcctttttagttaaccccacctgcccagttcccttattaggctgagatattttaaccacattatctgcttccctgactattgctgggctacagccacaccccattgctgtccttttccccaattcaaggcctctttcgcatcctccccttgtatctccccaccttaatcctcaagtataggatacttctactctttctttggcaactgaccatgcactccttaccattccattaaaacctaatcacccttaccctgctcaataccagtatcccagcccgcagcaggctttaaagggaactgaagcctgttatcacttgcctgttacaacgtggccttttgaagcctacaaattctccttacaactcccctatcctacccatccagaaaccggacaagtcctagaggctagttcaagaccttcacctcataaatcagattgtccttcccatccatcctgttgtgccaaaccctatactctcctctcctcgacacccccttccacaactcattattctgttatccacctcaaagatgccttctttaccatccccttgcatccctcctcccaacctcttttcacctttacttggactgaccctgacacccaccagtcccagcaattcacctggattgtccgaccccaaagtttcagggacagcccacactactttggtcaggccctctctcatgactttctttctgcccatctgcctcccaccttattcaatatgttgaagaccttcttctttgcagcccttcttaccaatcttcccagcaggacactatcctatcctacttcttcaatatctctactcaaaggggtactgagtatccccctctaaagctcatatttcctcccctagtgttacatatctcgacatagtcctccatcaacatacacgcactcttcctgcagactgtgttcagttaatctcccagaccctattccccaccaccaaacaacaactcctttccttcttaggcgttgttggatacttccgactctgggtaccaaggttttgccattctaaccaaactgctttacaaactcactaaaggtaatttagctgatcccatagaccataagtcctttccccatgcttcctttcattctctcaaaaaggccctagaaacagctcccacactagcactccctgacttgtcccaacctttttccttacacacagctgaaacacaaggctgtgctgctggagttctcacacaggagccaggcccacgacctatagcctttctatccaaacaacttgacctcacaattctaggctggccctcatgtctacatgtggtggcagctgccgctttaacacttccagagtctctcaaaatcacaggctatgctccacttaccctctacagttctcacaaccttcaagcattaatatcctcctcacacctttcacacttgctgtctgcccctcgacatctccagctctattcactctttattgaaaccccaacaataactactgcccatgggcccgatttcaacccagcttctcacttagcacccaacacaagtcctggccaacatgattgtatctccctaatacacatagcatcttccccctttcctcatatttctatttttccaatcccaaatccagaccacacttggtttattcatggcagttcctctaaacccagtcaaatctcgccagctaaagctggttatgctgtcgtgtcccatacctctattattgaggctgctgcacttcctccctccactacttcccaacaagccaaactgattgctttaacttgtgcactctctgtcgccaaaggaatgcacattaaaatttatattgactcctaatatgctttccacatcctccacaaccatgctaccctttggactgaaagaggttttctcaccacacaaggctcttccattatcaatacctctctaataaaggccctccttaatgctgctctcttgctggccaaagctgggttcattcattgtaaaggacaccagaaaccaactgatcttattgctaaaggaaatgcctacgccaacaggacagcaaaagaaacagcaaatgcctccacgcctgcaaatattctagccctcaccccaaaaggctagtacttttctttcttctctatcacccccacctactcctcttctaaaaaacctgctctaccagtcttttccaactcagggcaagtggttcttagatcatggaaaattcgttcttcctgcctcacaagcccagtctactctctcttcccttcatgaccatttccatataggatataagcctctggctggcctcctacagcccctcatttccatcccatcatggaaatccatccttaaaaccatcacctctcaatgctctgtctgccatgccaccaacccccgaggtcttctcaggcctcctccttttcctacgcatcaggctcatggatttcctccgacacaagattggcaaattgactttattcatatgccgcgtgtctgtaaatttaaatatctcctggtttgggccaataccttcaccggatgggtcgaggcctttcccactagctctgaaaggctactacagtcatttcttcccttctgacagatataatcccccaatttggcctccctacttccacagtttctcaggctcttggtattcagtggaaacttcataccccctaccgtcctcaatcttcaggaaaggtagaacggatgaatggtcttttaaaaacacacctcaccaagctcagcctccaacttaaaaaggactggacagtacttttaccacttgccctcctcagaattagggcctgtccttgagaagccacagggtacaacccatttcaattttatatggatgcaccttcttactcagccacaatcttgttccagacaccagccccctgggcaactatcttccagtcctctagcaggctagacaggaaatttgccaagctgctaatcttctcttgcctactccagattcccagccatatgaagacaccctagctggacgatcagtccttgtcaaaagtctgacccctcaaactctacagcctcaatggaccagaccctacccggtcatttatagcacaccaactgccgtccatctgcaggaccctctccattgggttcaccattccagaataaagccatgcccatcagacagccagcttgatctctcctcttcctcctggaagccacaagattaggccgagagccgatcagacaaacaacctacaacccttaagctcctggcagcgcccagccaaggccatgcttccttgcaacactccttccaaatggccatcccagcatgcttccaagcaggcttcatccgttcctctggaccctcatctcttaagacctgccgcctataaaaaggattatatcttgagaccctatcctctaaaattttttccacacccaaaacaaaaaatctctgggtcaaaagtctaaaacgcttaggctggcaaccatcagatccttgcccatggtgtcctcaagcctactctcatgaaatggacaacagtacacgcatatggggccagttccacatatttggcaaccagaccagcatccaggacaacacaaagtatgttgtttgttgttagagggcttgggacatttcactctttgccagcctcagcttaatccaggagacaaagattattttccttattatctcttctgcataggatctgcaatcagaactattgaacttctccattcagaccgccactcacacctatgggaaaagggtaatgtatcatcggcttagcaacagggaatactattcgtatgatggaaaatggggacaaaaggctttggtacataaaacattattccttccttggcctaaaaactcatcgccacctacattaaagctaatatgcctgattactgtttttagagaacttattttattagggcagttccaagctcaaaaatacgctaactggcaccttgttagctacataaaaatgcaccctagacccgaaacttactagactcattataaaattttctttaaggtgtccacgcagtccctggtcacacttgaagcagtccggagaaatatcagccctaccccagtaatccccagaaggaacttacacttttttttaatcttttcctacaacttcatattttataaataaaaagacaaaaatgtcaggcctgtgagctgaagcttagccattgtaacccctgtgacctgcacatatccgtccaggtggcctgcaggagccaagaagtctggagcagccgaaaaaccacaaagaagtgaaacagccagttcctgccttaactaattaacccaccttacgacattccaccattatgacttgtccaccattatgacttgttcctgccctgccccaactgatcaatcaaccctgtgacattcttctcctggacaatgagtcccatcatctctccaccatgcaccttgtgaccccctcctctgctgaggataaccacctttaactgtaactttccacgcctacccaagccctataaagctgcccctctcctatctcccttcactgactctcttttcggactcagcccacttgcacccaagtgaattaacagccttgttgctcacacaaagcctgattgggtgtcttctatacggacacgcgtgacaggaacctcaacccaaaggcagtctgatgaggtgtctaagataaaagtagcggcacaaaggcttttgtaaacagaggcgtttcatgtggttttcctttcctttccttatatgtgaaaaggtgacagaaaagaaatcttcctaaaagagtcagccactgctctgtggaacgatgatcatttaaatgccacgtcgatttgaaacgtacaacaaagggactaacagttgagaaccatgtggattgcagtggagacgctggcgttagagaatgcggggagggaaacgttcattacaagatttacggccagcccaagggggagcgaggctgggggaccgggtcgcggagacccggcttcgcacaccttttggaagactcagggagaagcgggggccgccttcggggggaaaggcgggactggggagcccacaggccatggctcctcccacaggatccccaggccggaggcgggatccccccatgatcctcccgtggcccccgcacaatctggggagatgcggagctgcccagagagggctctggggcgacagtcactgcgcagggacaggacaggactcccggagtcccagctgccggcccagccccaccctgcggccgagaggaccgagggccgagctgctccaggggaactcgggtcccagaccccggagtcgcagcggacaggcccgggtcccgccacagccagatccggctggttccaccagctcctcctccggtctcgggacgtccggccccgcacactcagcatttccggcttccgggtgtcccggcgtcctcccctgggcctgctcacgtcgcagaggggcggcgacggggattagaggggaggagggcctgcgcgagcagcaaagaccccaaaccccaaaaaacaaagaaaccgccagaaactgaagcttccacagcccgccacgtcccccggctacggctacgctcctgattggatagttagtacggcccctagtgcccctgattggataccgcttcaggtcccgccccctggggttagaaagacaggagacccgagaagacacttggctgcgtggagcccaaatgggcggttcctggcaactgggcttgttgtcttcctcgtgtcaggatgtaaaaagaaaagtagaggttcttcttcaaagacttccttcttcatctaattaagaataaatagtgtttgaaatgcttggtttttggtgccataaagaaatagcactttaacattaatttatttagcaaggccatttttactccctgcagaaagggtacactcgccagcagttttgccacgagcgtacaccgagcaaaggagacagggtcatttataacctgaggtgtccaccctactgctgtgtccagtttccattggctggaacgggacctcacattctgtgtttgtcctgattggctagcaacttagaacgttttaaaagaggcaaaggtggaggagaacaaaggaagaaggaagtaacttgtggaatgctgagaaaggtaaaaacaccttcaaataaggaagaggaagaggctatgacttaatgcttgcttggaccagtataagcataccagggcaaatatttgggctaaattgtgggagctaagaacataaagtatattgatttctttattatggctagcagatatttaagaatgttagcacaggtctttgaataaattttgcttttaagagaagttactatttattcctaatcgaatgggaaggaaaatttttgaagaggaacctctactttactttttacaaacaataacttgttttagaagcaacatttatttaaagacttgtactaatattcttaaatatttgctagctgtaataaagaaatcaatgtactttatgttcctagcttttacattttagcttaaatatttgctttggcatgcttatactagtctaaccaagtattaggtcgtagcttgttctttatttgaaggtgtttttacttttcttagcgttctacaagttacttctttcttttgttttcttctgcttttgcctttttaaaaaaagttctaagttgctagctgattgggataaatacagagtgtgaggtcttgttccagctaatggtaactggacacagcagtagggtagacgcgtcaagttgtaaatgaccttgtctcttttgttcagtgtactctcgtggcaaaaactgctagcaagtgtatcttttctgcggaaagtaagaaactggccttgctgaagaaattaaattcatgttcaagtgctattctttacagcgcccgagaacaagcatttcaaacaaggacctctggggattgggggtgggggtggggtgacatttgcaagtggacactggcattcatcagtactcactgggcccttcctctttcttcctcctggactaggggaaattccacacagtgttgtccatcaagaaaaatgcccagacaaggctcaatcattttaggaggtttatttgccaaagttaaggacatgcacccctgacacagcctcaggaagttctgacatgtgcccaaggtggtcagggaacagtttggttttatacattttagggagacatgagacatcagtcaatatatataaggagtatttggttctatccagaaagatggggacaattcgaagcagggagagggcttccaggtcacggagagacaagtggttgccttctcctgagtttccaatatgcctttccaaaggaggcaatcagaatatgcgtctatctcagtgagctggagggatgacttcgaatagaatggaaggcaggtttgtcctgagcagttcccagcttgaattttccctttagctcagtgattttgggggcccagtggagccaaggatcccgtggcgtcagagcaggaggggaggccaggccaggcaagactggaacaggagggaggacctttggggtgaggctgttggcaacgaaagtaagggtttctcataccttatcattcaatctattccttttcatacaagaagataaagacacagcagcaagaacaattattaaatgcatgaaaaaaacagagttatatgacagcaatattccataaaggaatcaaaacacaaaaaggcaaaaaatgagcttgttcagataagcagggtgccacacccacagttcaaaaagaaaatcgccttcaaggggttaaacttattcccaagcttgagagccatgttctgctgaagtggagacccagggtggaccagaccaggggtgacgaggcagggaaacctaaggatttaactctgtcagcctaccatgttctcttgccccattctcacagtgtggaaatgcttccctccttcaatgccttggtttttgccaacagaaaattctcacaaggagttgttacaggagaggggtcctgatccagaccccaagagagggttcttggatctcacacaagaaaaaattcagagtgagtccctaagctgaaagcaagttcatttaaaaagtagaggaataagggctgggcatggtggctcatgcctgtaatcccagcacttagggaggccgaggcagacaggtcacctgaggtcaggagttcaagaccagcctgactaacatctagtgaaactctgtctctactaaaaatacaaaaattagcttggcataggggtgcacgcctgcaatcccagctacttgggaagctgaggcaggagaatcgcttgaatccaggaggatgaagttgcagtgagccgagatagcgccactgcactccagtctgggtgacagagtgagactctgtctctcaaaaaaaaaaaataaaataaaggaataaaagaatggctactccatagacagagcagtcccaagggctgctggtggcccatttttatggttatttcttgatgatatgctaaacaagcggtagattattcatgcctcccctttttagaccatatatggtaacttcctgacgttgctatggcatttgtaaactgtcatggggctgttgggagtgtagcagtggggaccaccagaggccactctcgtcaccatcttggttttggtgggttttggccagcttctttactgcaacctgttttatcagcaagctctttatgacctgtatcttgtgccaacgtcctatctcatccaatgacttagaatgccttaaccacctgggaatgcagcccagtaggtctcagcctcattttacccagctcctattcaagaaggagttgctctggttcacatgcctctgacagactcattttaagattcagacctgaataaactgtcaaattcaaaaactgttgttactggaaaggtgtctccatccaaaccccaagagagggtgcttggaccttgtgcaagaaagaattcagagcaagtccataaagtgaaagcaagtttattaagaaagcaaaaggatgggccgggcccagtggctcacgcctgtaaatcccagcactttgggaggcagaggcgggcagatcacaaggtcaagagatcgagaccagcctggccaacatggtgaaaccccatctgtactaaaaatacaaaaattagctgggcatggtggtgcacgcctgtaatcccagctactcgggaggctgaggctggagatcgcttgaacccgggaggtagaggtttcagtgagccaagatcgtgccactgcactccagcctagagacagagcgacactctgtctcaaaaaaaaaaaaaaaagaaagcaaaaggatgaaacagtggctactccataggcagagcagcccgagagctgctagttggctatttttatagttatttcttgattatatgctaaccaaggggtggattattcatgagttttctggggaaatgggtgggcaattcccagaataagtgttcctcccctttttagaccatatagggtatcttcctgacgttgccatggcatttgtaatctgtcatggtgctggtgggagtgtcttttagcatgctaatgcattataattaatgcataatgagcagtgaggccaaccagaggtcactttggtcaccatcttggttttagtgggttttggctggcagctttttttttttttttttttttgagatggagtcttgctctgtcgcccaggctggagtgcagtggcaccatctcagttcactgcaacctccacctcccgggttcaagcgattctcctgcctcagcctcctcagtagctgagactacaggcacgcgccaccacgcctagctaacttctgtatttttagtagcgatagggtttggccattttggccagtctgatctcaaactcctgacctcagggatcttactgcctcagcctcccaaagtgctgggattacaggcatgagccaccgcacccggccaaaacaagtataactaatttatacattctattacttgatgtgttttttaccctctggatgctgctatcatttttctttctttctttctttctttttcttttttttttgtttttgagacataggctcgctctgtcacccaggctggagtgcagtgatgttatcgtggctcactgcaacctccgcctcccaagttcaagtgattctcatgcctcagcctcccgagtagctgggattacaggcgcccgccaccacgcctagctgatttttgtatttttagtagagacggggtttcaccatattggacaggctggtattgaactcctgacctcaagtgatccacccgcctgggcctcccaaaatgctgggattacaggcgtgagacaccgtgcctggccagagaaaagtattttgttgctgcttctgggtgcccagagaaatgagacatggggctgggttcacaggaaacgaggtgagttgtgagacaggggctggggtggggacactaaggtggcagttcagctgcatcttgcggccctacctggtgggggcgctgtgaccctggaccagcagcttggcctctctggacctcattttccattttgtaaagtgggcctggattattccagtaagagacacactatgtgtgaggatgctggcccagagtaggtgcttggttggggtgaacgccccttcgtctttccccatttcatttttctcttgaactgtgcacattattccttcatttgtcccacaaatatttgttgagcgcctgctatgtacgcagcagtgggtggcaaataagcaaaaagtccctttgaacctcagccttgtggctccactcagcttttctcccaggcaggacccttgcatttctgaatctctccactgggcttcacccagggatgatcaaaaaatatgagttccagaagatacattccccacacgagcatcagcccttcctttgcaccagaacctgtgctcacagctgcaaagaggcgtggatgagacccatccctccctcaagaaacatcttctccatctacttcccttcactgcaccctgcccttgagtcagggactatgatacgattttcctcatttattcaatctgatcccaaatacatttatccgatcccaaacacatgaaatctggcagatgctcatttttaaattgacaaagaaaatatgcacatgggccaagggcagtggttcacacctgtaatcccagcactttgggaggcccaggcaggcagatcacttgaggccaggagttcgagatcagcctgggcaacatggcgaaaccccatctctactaaaaatacaaaaattagccaggcatggtggtgcacgcctcctagctacttgggaggctgaggcacgagaatcacttgaatccaggaggctgaggttgcaatgagccaagatcacgccactacactccagcctgggtgacagagcgacactctgtttctaaatgaatgaatgaataaataaataaaatatccatgtggctagccagttaacccagtgccatttatcgaatatgtcaacttaaaaaagagtatctgccagatttcatgtgtttgggatcagatacatgaaataagtgtattttattggaaataaaaatatatttatttatttgtatatatttatgctgcacaacacatttggatatatgtatacatagtggaatggctccatcaagccagttaatatatgcattacctcacacatttatcatttcgtttggtggtgagaatgcttaaaatctactctcaataattttcaaatatacaataggttgttataactatagtcaccatcatgtacactagatctcttggtcctcctgcctaactgaaattgtgtgtgctttgatcaacatcaaaaagatgaacgataacaagtgttggcaagaaagtgaagagatcatgttaaaaccctcaacaaataaggcattaaaggaacatacctgaaaataataagagccgtctatggtcaacccacagccaacatcatactgaatgagcaaaagctggaagtattccctttgagaaccagaataagacaaggatacccactcttatcactcctattcgacatagtactaaaagtcctagccagagcaatcaggcaagagaaagaaataaaagacatccaaataggaagagaggaagtcaaactatctctgtttgcagatgatacgattttatacttagaaaactccatagtctctgcccaaaagctcctcaatctgataaacaactggtaaagtttcagaataaaaaccaatgtgcaaaaactcaataggatttctataaaccaacaatgtccaagctgagtgccaaatcaaaaacaccatctcattcacaatagccacacaaaaaaataaaatactgaggaatacagctaacagggaaggtgaaatatctgcctgtggtcccagctgcttaggaggctgaggcaggaagatcacttgagcctggaaagtcaaggctgcagtgagctgtgattgcgccaccgcactccaggctgggaatggactgagagcttgtctttttttttttttttttttttttgagctagagtttcgctcttgttgccaaggctggagtgcaatggcgtgatctcggctcactgcaacctccacctaccgagttcaagtgattttcctgcctcagcctctcgagtagctggggttacaggcgcacacaaccacgcctggctagttttttgtatttttagtagaaacggagtctcaccatgttggccaggctggtctcgaactcctgacctcaggtgatccacctgcctcagcctcccaaagtgccaggattacgcgtgagccaccccacccagcctctaaattaaaaaaaaaaaaaaaaaacaagttataaaagctccaggcacagtggttcacacccataatcccagcactttgggaggccaagatgggaggatcacttgagttcaggagttcaagaccagcctgggcaacatggtaagaccccaactttacaaaaaattttttttcaattaaagaaaaacatcttgctaaagaggtctcctcttcctgagataaacggctgcttgacagtaaatagaggcaggaaacctcatgtttgatctgctgcttgataacaagaagacatcaaaaccaccacagtagctgcttaagatgataaaaatgaccatcctcagtacataaagactgtgcatgaaataacttatctccagcttagaggaagttccgccccagctaccacacatttaacagatcttcccagaacatctgagctcatcactgagccaggagctgggatgactgcagtggccagggcagacatgatacctgctcttgtggactttacactggacggagaaggtggaggatgaattattggctgagttttagaaaagagcatgaggagtgtgaggaagagatggcagtggctatgggggatgaacaacctcatcctcagaaatcaggacacctggttgggacttcggggaggagatggcatttcagccaagacattctgctccaggagcagagggagaggaaagggtgcaccaggcagagggaagagcatgttccaacgacccgaggtgggaagatgattgcccatccaaggaaaagaagaaagacaatatgggccgggtgtgatggctcatgcctgtaatcccagcactttgggaggccgagatgggtggatcacttgaggtcaggagttcaagaccagcctggccaacatgatgaaattctgtctctattaaaaataggaaaattagccaggcatgttaatgcacacctgtaatcccagctactcaggaggctgaggcaggagaattgcttgaacccagggggcagaggttgcagtgagctgagattgtgccactgcactccagcctgggcgacagagtgagactccatctcaagaaggagaagaagaaggagaaggagaaggagaaggagaggaaggggaaggggaaggggaaggggaaggagaaggagaaggagaaggagaaagagaaggagaaagagaaggagaaggagaagaagaaggagaagcagaaggagaagaagaggaagaagagggagaaggaagaaggaggaggatgagaagaagaaggagaagaaagccaatatgggccgggcacagttgctcacacccgtaatcccagcactttgggaggctgaggtgggtggaacacttgagcccaggggttcgagaccagcctggccaacatggtgtaactccgtctccactgaaagtaggacaattagcccggtgtggtgatgcatgcctgtaatcccagctactcaggaggctgaggcaggagaatctcttgaacccaggaggcggaggttacagtgatctgagatcatccaacctaggcaatagagcaagactccatctcaaaaaagaaaaaaagaagaaggagaagaggaagaaagaaagacagacaaacaatatgacaggggccttgggcagcaaggagtggggagtggctcatggagccaaaatagacagtcaggggtctgatttcaaagggtcccaacagccccaagattacactcatctacacgggtgatactgtctgtccatgataaacacagaaggaacagtgggttcaaatgaggtcaatcacacctggaaaatgaatttcaaataaactcaggaatagccattcacatttcaaaaggattttgcaactcacaaatctccatagcattggaatgagagagtcatttgcttgttttctcagcaagtatttattgagcacctattagatgctgggtggtgggacacaatgatgagcgagtccaaagtggtcctgcctcctcaggtggccagtctagtggaaggaacaagggatatgtctattaagtaacttatatgacataatgcagttagcattacagtagaagtagaagcctcggcccctctcagagctctggaaaccttcccctccatctactccagcagcatgggaagttcacgggggccacagctggcaccaagtgttttccacgctttgcttctgagggccaagatgccatggtgctttctgtagcatttaactgtgtggagctctgggactcttgtgtcttgggggaagaaaggaccactttttttttttttttttttttgacagaatcttgctctgtcttgcccaggctggagttcagcgaatgatctcggctcactgcagcctccgcctcctaggtgcaagtgattctcctacctcagcctcttgagtagctgggattacaggcgcctgccaccacacccgactaatttttgtatttttagtagagatggggtttcaccatgttggccaggctggtcttgaactcctgacttcaggtgatccacccgcctcggcctcccaatgtgctaggattacaggcatgagccactgcgcccagctgaaggaccacttctaattcctacctatgtctcttgctgctaattaaacatctaagtttagaggctaagggggatactacctggggaccattcctccggactggagtgagcctgtgtttctgtcttcatcttagccccgagctatggatcaaacctcggctgcctgcagctctgtggttgatcctgagggactccttcatttacacaaatgaagtgtagataagaattgtgtgtcaacttttaatgagccctcaagggtcattgaaaaatcccatggctagttcactgatgaaacttagaattggcttcccagggattgttatgacaatagagtttggtagatcgtgccggcaggtgttccactgggctgtttgatgccactcaaggctctagccaagcgcatctctgatgtgtcctccaggaagggtgtccaggggctttgactgatgagcacggggagttttggaggagggctggaggtggcgggttcagatgaattctactaattgcttggtatatggaccccatgacatcacttcaactgaattctctgggagtttgtttttgtttgtttgttttctgtttttttgtttttttttttttttgagatggagtctcactctgtcacccaggttggaatgcagtggcacaatcttggttcactgcaaccactgcctccagggttcaagtgattcttcggcctcagcctcctgagtagctgcgattacgggcacttgctaccacacccagctaatttttgtatttttagtagagatggcattttgccatgttggccaggctggtcttgaactcctcaacttaagtgatcctcccacctcggcctcccaaagtgctgggattacaggcatgaaccactgcacccagccattgttttctttgtttcagcagagatccactggacgtatgaattgtggatttctctttgggttcttaaacacagattaacaggcagagggtgacttgtataatagtctaagtggcttcatgcctcaggaccctggctcacatcagataaacttgactcgaatcctggcctacctatttcctggttgtgtgaccttagtgaagtgaattgacctctctgaacctgtgtctgcaaatggggaggccaataataatagcacctgccccacagcatgatgcctgtaaacgtattggcatttcataaatcctcaatacgtgctagacagtatgattgtgtcacccagtagagtcttgtagggatctgggtacaactgatggagccagctcatggctttacttacctcacccccacgcctttaaaactcatctattcatgcctgtattaaggatttattcaacactttttgtgttccaggctgtaggaaccaaaccttgtctgcctgcagctcaaacaagagaacaagcaagatgagatcctctgccctcctggtgttttttttgttctcgtggggagaaaatgtattaaaatatgagttactgcatcagacatataaaataataatttcaagaaaatggatctgtgattgtaaatattgggtcaaatttagcatcagagtaaacaaataaatggatattatgtcacaatcagggcggactgtaattaaatgactttctagagtgcggctgcatccccatgaagctcagaccccattgttgcctttttattttattttattttatttatttatttttgagacagagcctgttgcccaggctggagtgcaatggcgtgatctcagctcactgcagcctctgcctcctgggttcaagcgattctcctgcttcagcctcccgagtagctgggattacaggcgcctgccatcacgcctggctaattttttatatttttagtagagatggggttttaccatgttggccaggctggtctcaaactcttggcctcagcctcccaaagagctgagattacaggcgtgagctgccactcccgatctggtcttgatttctctttttttaaggacactaaccccactgggcgaccctactttcttggcttaatcttaacctaattacattccaaaggccccatctccaagtattatcacatggggggttagggcttcaacacatgaatttttggggatacacacattcagctcataaccctgatctgaagctaagtttctgaaccaggagcaagaaactactcttagtttctgatagcttgtctccatgaccctggaagaaaaatcaaacattatgtttcttttctctgcagcaaggatgcaggcatctatctcattcccacacagttccaggttcagttcccttgcagtcctaaggttcagggcagtgagagcaagaaccagaccaggttcctatttgacctaattcctttttttttttttttcctttttttgagacaaggtctactccgtcacccaggctggggtgcagtgttatggtacgatcaaggctcactgcagcctcaaagtcctggcctcaagcaaccctcctgcctctgcctcctgagtacctgggagtacaggtgagtgccaccatgcctggataactttagtattttattttatattttattttatttatagagatggggtttcaccatgtttcccaggctggttttgaactcctgggctcaagcgacctgcccgcctcggcttttcaaagtcctgggattacaggcatgagccactgaccatggcctaatccaaaatgatatttgttggggaagaagtgttcctacggatcgtgaccttgttatgccatgactgtttggctgtgagtgatattcctgtaaatatgtgagtttgagccaggttcaaggaacgatcatgcctaattcttttttattctttcaataaatatttattgagcaagtattctgatgggtttgaactgggcttggatgcagcaacaggactgggaggatcacatcccttagccagttcctcacattgatccaccattgcctcacagactttggtcttttactgccttaataattttcactaagaaccatctgcactatgacgtgtttctctcgatggactcactctttttttttttttttttttttgagacaaggtgtttgttgcccaggctggagtgcaatggcacaatctcagttcactgcaacctctacctctgggttcaagtgatcctcctgcctcagcctcctgagtagctggaattacaggcacgtgccaccatgccaagctaatttttgtatttttagtagagacggggtttcaccatgttggctaggctggtctcaaactcctggcctcaagcaattcacctgctttggcctcccaaagtgctgggattacaggcatgagccactgcacctggccaaagctgccacttttaaaccatcagatctcatgagaactcattcactatcatgagaacagcgtgggggaaaccacccccatgatccaatcacctcccaccaggtccctccctccacgagtggggattacagttcgagatgagatttgggtggggacagacagccaaactatatcaggacctgagggcctcagctatctttttcctgaaagcttcaggctaattgcatcagaagaaagcctctgatctgggtgtttagtgaaatagaagttggtcccctgtattggtcaacctaggtttggaatgctgcagtaacaagtagtgaccttgaaattttagcaaccataaaccaaaactaaaattctaaggcctcccaaccatctgaatggactcctcctttctcggccaagggtattccaaagttaacctgaaaaacctgaacctagttcaggccatgatgggaagagaaggtagaagtagaaggggccagacatgcctcattacagcctcctcccttttggtattcaggaaaagcagaccagcataaacgtcaatgcagaccttaagtctgataagaaacatttaccatctattctctctgaggcctgctacctggagacttcatctacataataaaaccttggtctccacaaccctgtatcataatccagacattcctttctattggtaataactctttcaacgaattgccaatccaaaaaaattttttttttttttgagacacagtcttcctctgtcgcccaggctagaatgcaacgttacaatcttggcccactgcaacctctgcttcccaggttcaagtgattcttctgcctcagcctctgagtagctgggattacaggtgcccaccaccacgcccagttaatttttttgtatttttagtagagatggggtttcaccaggtttgccaggctggtttcaaactcctgacctcaggtgatccacccaactcagcctcccaaagtgcagggattacaggcatgagccaccgcacctggcctgccaatcagaaaatttttaaatctacttatgactgggaagcccccactctgccaaccctgcatcgctgcccagcttcaagtcgtcccacacgtccagattcaactaatgcaaatcttacatgtattgactggtgtattatgtctccctaaaatgtataaagccaagctgtaccccaaccaccttgggcacatgttgtcagtacctcttgaggctgtgtcagggttacatccttaacctgggcaaaataaattttctaaattgattgagacctgtctcagatattttcggattcacacaactgacaaccacaaagcttcatttcttggctacatttatatccatagtgggtccacagaagctctgttctgcagggtcttcttccttgcaggaccaagtgtgaaaaagtggcctctctctgggatgggctgttcttgtagcaagggaaaagcaaaaataatataaccacataaggctcttaaggttcctgctcagtggtggtacatgccaattcctgttccatctcattacctcaagcaggagcatggccaagcctggctttaatgggagtgggaactacaatccccttgcagggatagacggacccaacattgctcctggggcgtttcttccactcagcagaaatcagaaaaggacatgaaaagtgagtaagccttgtgccaagaaagactctaggctttggagaaacgtcctttattgttgcctctggggattcagagcccagagagggcagggatggaggttgaggatgcacaacaagaggtttacaccaatcttatggggtaggggcctaggtcagcagctctgcctcttctcacagatgtaaacaggagactctgatttgcaagaggagttgctccagtgtccctggtagagcatcatcacacaggctggggtggttccattatcatccaatttcctggagtcccagtttctgtgaagagatgcccaccacatccctttctgatgggaccagagcctgaagccccaactcctgccctctgtgagtcaggatctgccacctgaagctcaagaggcccccagttattggggcctcttattgagcccattgtatggccacttattgagcccattgtatggtaaccatctggtcaaccccttccctctttttttccaagtggagctcagataggagtagcaacaaggccacagtcttcagaaaagctgaaagtcttccagctcctgggccaccatccgactgccccatccctctgggcttctccccttctccaaggtccattccgcttgaaaccagacagaccccattcaaattccagctctgccacttgtatctgtttgactacggtcttaatgtctatgagctgccgtttcctgtttcacaaaatagaaattcattctgaggatatgatgaccagtgcacataaggtatacggaaggtgctcagattgcagatcaatctgccaatgagacaacttctgccctaagcttggccccatgcagagcagcttgccagtcagggaaggtgatgcaggaggtaggaaatgtcgcagaaaaaggcatacagtgtgaggatgcaagacaatgccaagaggtatagtgaattaaagtgtcctctccaaaaatatatgccatgtccaaccccctaacacctgtgcatgtgactttacttggaaagggggtctttacagctgtaattaaatgaaagctctcaagatgagatcatcctgggtttgtcaggtgggccctaaatccaatgttgagtgtccttataacagacagaaaaaaggagacacagaggtgaggagaaggccgtgagaagacagaggcagacagtggagtgatgccgccgcaagccaaggaatgcctggagccaccagaagctggaaaacacagggaaagattcttcctcagaccctttggaaggggcatggccctaccgacattttgactggaaacctctggcctccagaacggtgaaagaacacatttctgttgttttaagccacccagtttgcagtactttgctatggcagccatgggaaagtcatacagttggcaaatgctacattgtttcactccttctgagtaggcttagtgctcattagcacattcagggctctgaaaagtcctgcaacaaagaaagcagtttgacaacaggtgctggcaaggttgcagagaaacgggaatgcttttacgctgttggtgggaatgtaaattaattcaaccattgtggaattcctcaaagatctagaaccagaaatatcatttgacccagcaatcccattactgggtatatgcccagaggagtataaatcattctgttacaaggatacatgcacgcctgtgttcattgaagcactatttaagacatggaattaacccaaatgaccatccatgatagactggataaagaaaatgtggtacgtatacaccatggaacactatgcaatcgtaaaaaggaacgagatcgtgtcctttacagggatatagatggagctggaagccattattttcagtgaactaatgcaggaacagaaaaccaaacacagcgtgttctcacttataagtgggagccaaacaatgagaacacatggacacagggaggggaacaacacacagtgaggcctgtcaggaggtggggttgggggagggagagcattaggaaaaatagctaatgcatgctgggtttaatatctaggtgatgagttgataggtgcagcaaacaatcatcgcacacatttacctatgtaaccaacctgcatatcctgcacgtgtaccccagaaattaaaattcaaataaaatttaaaaaagattatgactctctctgaaggctcagatgattgttagcactttttatcaataaagtatatttaaatttaaaaaaaaagagtttgacattgaacccataatttctcaagcaccaaactgggaacactcttgtcaagtaacaaaataactataactaggataatagaaaagatgtcggctgtgcgcggtggctcacgcctgtaatcccagcactttgggaggccgaggccggcgaatcccctgaggtcaggagtttgagaccagcctggccaacatgatgaaaccccgtctctactaaaaatacaaaaaattagctgggtgtggtggcaggtgcctgtaatgccagctactcagaaagctgaggcaggagaatcgcttgaacccaggaggcagaggtggcagcgagccaagatcgcaccactgcactccagcctgggcaacaagagtgaaactccatcttaaaaaaaacaaaaaacagaaaggatatcaggcagtttgggagctactacgggtacttcattgtgaatgaatgaaagagaaacacctacagtggtcataacttactgcctgaaagccatgcctgcctcttaggggagactatctttggtgtcaaaggagatactcacatgtaggtgggggctgagccatccatccacctgtgggcacttccttggccatctttgaagaggcctatccaggatgtcgcctggttagttgatgtcaggaagtcctggaaggaagaagttacatttgggaggtggaattccttggaagctgaaaggatggaggcaggggtgtacagagggcgagaggagtaagttgcagagatcacagttagatgggcaggcagacagaggcaggcagggaattcactgcccttgaatcttgactttgaatctcagatctactatgtattaggttggtgcaaaagttatcgtggttttaccactatagaaaacagtgtggagattccttaaagaactgaaaatagggccggacacggtggctcacgcctgtaatcccagcactttgagaagccaaggcgggtggatcaccggaggtcaggagttcgagaccagcctgaccaacatggagaaatcccgtctctactaaaaatacaaaattagctgggcatggtggcacatgcctgtaatctcagctactcgggaggctgcagcaggagaattgcttgaagctgggaggcgaaggttgcggtgagccgagatcacaccattgtactccagcccgggcaccaagagcaaaactctgtctcaaaaagaaaagaaaagaaaaaaaagaactaaaaatagaactaccatctgatctaccaatcccactactgggtatctacccagaggaatagaagtcattatacgaaaaagatatttgcacaagcacttttatagcagcacaactcactattgcaaaaatatggaaccagcccaaacgcccatcaatcaatgagtggataaagaaactgtgagatagatatatactgtgagatatatatatactgtgagatatatatatacacatatatacacacatatataatatatacacatatgtatactgtgagatatatatacacatacacatatgtgtgtatgtgtacatatatacatgtgtgtatatatacatatatacatatataatatgtgtgtatatatatacacatatatacacgtgtgtatatatacacatatacatatatacacgtgtgtatatatacacatacatacatatgtatatatgtgtatatgtatgtatatatgcacacacagtggaatgctactcagccataaaaaggaatgtattaatggcatttgcagcaacctggatggaattggagaccattattctaagtgaagtaactcaggaatggaaaaccaaacatcgtatgttctctcataagtgggagctaagctatgaggatgcaaagacataataatgacacaatggactttgggaacttgggggtaaagggtgggaaggggtgagggataaaattaggttcagtgtatactgctcaggtgatgggtgcacaaaatctcacaaatcaccactaaataacctactcatgtaaccaagtaccacctgacctcaggtgatccacctgcctccacctcccaaagtgctgggattacaggcgtgagccaccgtgtccggccctattttcagttctttaaggaatctccacactgttttctatagtggtaaaaccacaataacttttgcaccaacctaatacatagtagatctgggattcaaagtcaggattcgagggcagtgaattccctgcctgcctctgtctgtcttcccatctaactgtgtctctgcatcttactcctctcgccctctggacacccccgcctccatcatttcagcttccaaggaattccacctgttcccccaaaacctatggaaataaaaaataaaataatcgcagtttttgccattgaaagtaatacacgttgcaatggcctccaacaattcagccacccctcagtttccccatcagcacaaacaaaagaatggagatccccagctcttaatatattctcacggccgggcacgttggctcacacctgcaatcccagcactttgggaggccgaggtgggtggatcacgaggtcaggaaatcgagaccatcctggctaacacagtgaaaccccgtctctactaaaaatacaaaaaaacatttagccaggtatggtggcgggtgcctgtagtcccagctactcgggaagctgaggcaggagaatggtgtgaaccctgcaggcggaggttgcagtgagccgagatcgcgccactgcactccagcctgggcaacagagcgagactctgtctcaaaaaaaaaaaaaaaaaaatatatatatatatatatatatatatatatatatatattctcacaagtcaattgtgagaagtgtgtgcacctaggaagaccccctggataaatattggctgtgagtgtgcatgtcagagcaagcagtttgatctataggccgtaggaagacttctgtcaggagactcaatcccagggacaatcttgagaccctatcttaggtcaagccttgtttttggcctaggagacccagacatgattcagatctagccccagagtcagtggataccaggcaaccccaatgcagcatgaagttctgggataaagatctctgatgggccgggcacggtggctcatgcctgtaatcccaatactttgggaggcagaggagggtgtatcacctgaggtcaggagatcgggaccattctggccaatatagtgaaaccccatctctactaaaaatacaaaaattagctgggcgtggtggcgggcgcctgtagtcccagctacttgggaggctgaggcaggagaatcgcttgaacctgggagatggaggttgcagtgagctgagattgcgccactgcactccagcctggcgacagagtgagacttcatctttaaaaaaaaaaaatctctgatgatgctacaagaggatgtggaggaagggatgtttgtgttgggcttttgagggatgaataagacttctccatgcagatggcaaaggaaaggactgtccagagagtgacccacaggaatcagagcttcgagacaagactacagtgcacagggtccgttccctgaatgacggagcagtgagattgggctggggcaagggaaggcagatcttcaagatcctactaagagtactgtacatgatcccaaaggggataaggataggaatcccaaaattcttgtagaatccttcctccacctccactagggtcctaactttccgtttcccacctattctgctcagctgttgatgacaaccaagtgagctgcttctgggcacaagaatcaatggcctggggccaggtgaggttgtctgaaaagaagctgtaacaggagccctggaaggccttccagctcttggggcagggcaggcaggaggattctgtgaggatggagccattagcaaatttagtgtatccagctttccacccagttgcccacccactcgcttctggccacattcctaatggcttccacttgaatacacccaacaatggggaactcactacctagacagttggtgcttgacattactgaaacatatcagaaggacatactaaaatgccataaatatcctactgggtgtgttagctcacgcctgtaatccaaacgctttgggaagccaaggcaggtggatcacttggggtcaggagtttgagaccaacctggccaacatggtgaaaccccatctctaccaaaaaaaatacaagaattagctgggcatggtggcacgcacctagtcccagctacttgggaggctgaggtgggagaattgcttgaatccaggagctggagattgcagtaagccaagatggcatcactgcattccaccctgggtgacagagtgaagctctgtctcaaaaaaaaaaaaaaaatgccataaatatcctattaagtggaaaaggcaactgtaggaataatgtgccaggcgcggttggctcacgcctgtaatcccagcacattgggaggccggggcgggtggatcacttgaggtcaggagttcaagaccagcctgtccaacatggtgaaaccccatctctactaaaaatacaaaaattggctgggtgtggtggcgggtgctcataataccagctactaaggaccctgaggcaggagattgcttgaacacaggaggcagaggttgcagtgagctgagatcacaccattgcactccagcctgagagaatgtgaataatatactacctttaaataaaatagaaaagcatatgtttgacattccttgttttcttaaagaaactctacggctgggcacagtggctcacgcctgtaatcccaacactttgggaggtcgaggcaggtagatcacgaggtcaggagatcgagaccatcctggctaacatggtgaaaccccgtctctactaaaaatacaaaaaaaaaaaaaaaattacccgggcgtggtcgtaggcacctgtagtcccaggtacttgggaggctgaggcagagaactgcttgaacctgggaggcagagcttgcagtgagccgagattgcaccactgcaccccagcctgggcaacagagcgagtctccgtctcaaaaaaaaaaaaaaaagaaagaaagtgtaaagcagtggtccccagtcaggggcgattttgtccccagtggacatctggcaatgtctgaaggcatttttgttcaccacaactagcggagaggtaccactggcatggagaaggtagagaccaagggtgttgctaaacaccctgcaatgtacaggacagccccttactgcaaagaatgattcatccccacatgtcaatcgtattgagtttgagaaaggctgccctaaaggaataaagcccagctaattccagtagttcttgggagtttgtgttggggcttaggtggggaacatggcaatgaggtttcaggagtgggagggaaaattctcactgattttatctatatccatctacagaacacatacaccatcaatcattacttgtgggttccatatttacaaatccacctactcactgaaatgtatttgtaaccccagagcagatacttatgtcattttgggggtcatttgtgcggataagcagagtagtgaaaagtttgagtctgagatagaagaaaagaactctctgctgtcttgtttcagctttcctgctgtaaacaagtgtccttttcatggactattaagtgccatgtttttcacatttttgtgcttttctttctttctttctttttttttttttttttgagacggagtctcattctgtcgcccaggcaggagtgcagtggtgcgacctcggctcactgcaacctctgcctccggggttcaagtgattctccagcctcagcctcccgagtggctgggactacaggcacacgccaccgcatccggctaatttttgtatttttagtagagatggggtttcaccatgttggccaggctggtctcaaactcctgaccttgtgctttttgtcgatgactttgttgttgaaaatggccctggcataatgctgaagcactgtctagtgttcctaaatgcaagaaggctgtgatgtgcctcgtggagaaaatatgtgtattagagcagcttcattcaggcttgagctatagtgctgttgaccataattcaaagtgaatgaattaacaatatatataacacgtatttaaacagagcctgtaatccagcactttgagaggccaagttgggtggatcacttgaggccaggagttcaagaccagcctgggcaatatggcgaaacaccgtctctactaaaaatacaaaaattagctgggcatggtggtgcatgcctgtattcccagctgcttgggaggctgaggcaggagaatcacttgaacctcggaggcagaggttgcagtgagccaagatcatgccagtgcactgcagcctgggtggcagagggagactctgtctcaaaaaaaaatgtatttaaacagaaacacacacaaacaaggctacgtaatgatcagttgacaaaatgctgtgatgagagtctcgctggaacctaactgtattttctcctgggacctgtggttcaggattcatgaaatcagttctctctggacttcatagtgtgtagcaatggtggatactaagactcaacggcatatacagcatatctcatcctgtcattcaaaagttctatttacattctgttaagtgaaataagctaggcacagaaagataaatcctgcatgatctcacttatccgtggaatctaaaaaatctaattcgtagaagcagagagtacaaccgtggttaccagggaatgggggagggggggtggggtaaggagatgttggtcaaaggatgcagagtttccatcagacaggagaagtaagtttggtcatgatccactgcacagcatggtgaccatagttaataataatgtcatctctattccaaaattcctcaaagagtagattttattttttcttttctttctttctttctttctttctttctttccttctttctttcttgctttttgttttgtttgtttgtttgagacggagtttcactcctgttgcccaggctggaatgcaacggcacaatcttggctcactgcaacctctgcctacggggttcaagggattctcctgcctcagcctcccaagtacctaggattaaaggctcccatcactacgcccggctaattttttgtatttagtagagaaggggtttcaccatgttggccaggctggtctcgaactcctgacctcaggtgatccgcccgtctcagcctcccagagtgctgggattataggcatgaggcaccacgcccagccaagagtagattttaactgttctcaccacatacacacaaaagaatatgtgggtgaggtgatagtttcattagcttgatttgctgatagatatgttcattagcttgtggaatgattattccacaatgtatgcattttaaatttttatttttatttttatttttttgagacagagtctttctctgtcacccaggctgcagtgcagttgcatgatctcagctcactgaagcctctgcctcctgggttcaagcaattcttgtacctcggcctcccaggaaactgggattacaggcataggccatcacgactggctaatttttgtatttttagtagagacagggtctcaccatggtgccgaggctggtctcaaactcctggcctcaagtgatccacctgccttccttggcctcccaaagtgctgggattacaggtgtgagtcactgtgcctggcccacaatgtgtacctttatcaaaacctcacattatacctcatggatctatacaattatccattgaaattttataaaacatttcatttaattaaatgttcatttaaatttaaattaaacttgcattaaagtcaattaaatatttttcaaagttttattaactttttgatatcgacttaattttttttagttttgggaaggaaaagagttctacttaaaatatgtagcacaaaggtaccacctacaacggaatgtgatccaatagggttgtgtggaacccaggcatctgcattttagcaaactcgctgcattcatctgacaggctgcagaggacccactgtattttgcagcacactgatgtggtgatttaaagtggaggctccggtcagaggtagatttacagcagacacctgtaatcccagcacttttggaggccaaagtggaaggatcgcttgagcccaggaatgtgagacaaggctgggcaacatagtccagggaaagaggaggggagggaaggggagggggagggggaagggaggaggagggagaggggaggggagggagagggggagggggaggggaagaagaaggggaggggaagggggaagggaggggagggaaaaagaaaagaggaggctctgaatcctgacaatgactcttgagaatgacactgctcatttccccccgattctgcagctgagggaactgaggctgagagaggttaaaggggctgtccccgcggttgcacacagccacacctgcagagcaggtctcactgtcctcaaagccttacttttctggtatcccttcactatccgttggtctgaccatgtcacctcaactttctccatgttccgctagcactaaaaagacccaagaatcccccgggcattgggctgcctttccgagatccctgctacaggaagcccccgtcaccagtgccgaaaggagcagagtccccgcccttcccccacctccctttccccactcctcaccattgcgtgcctggacaacctttatttgcctgaacatttcaccccgaatgaagtcccggtcatgtccggtgtctgccagccccggtgtcactgagagacccaaagagaacgcgctggtaaaggtcttggcagagttgcgggttgggagatgtgattaagggtcggggggcggggcatctccttggacgcccactcacctttttcatcccgcacatccttcgtcatcctcaagactggggagagacgccagcagcatgttctagacgctcccctcactcaaagaacctccctggggtttctctgtgttcccccaactcccagagtccaagactttcttccagccccagggcaaggcactttggagctctgaaatgttccactcattttgcggatgagaaaacccaggcccagggacataaagtttcttgtctaaaagcaaccagctagtgagtagtaaggagggaatttcattccagtgtgtctggactgtttagggaatgcaggcagcctggaggttctaatcccagctcagggctgggcttaggggaggtgctcaccaatgactcaaacctgctcgctaatgattctgctccttcagttcatacacacccccgcatgcctccctctgaggctggtgaggaggtcagctccctcctgtgtcaccatggtcacccccagggacacgaccagcagcccctccggctccacccctatcccagcgtttccgaatccgacccaccctacaggttgggagccctcatggctgctgtcccggggccacctggtccccctgattcagccgccttacctctggacagaagcacactgaggagaacaaccaggagaagcaggatcagagacaccaccgggcagagatacttccaggtctttttttattttttattttattttgtttttgttttttttttttttttccgagacggaatcttgctctgtcgcccaggttggagtgcagtggcgcaatctccgctctctgcaagctttgcctcctgggttcacgccattctcctgcctcagcctcccgagtagctgggactacaggcgcccgccaccgcgcccggctaattttttgtatttttagtagagatggggtttcaccgtgttagccaggatggtctcgatctcctgacctcgtgatccacccgtctcagcctcccaaagtgctgggattacaggcgtgagccaccgcgcccggcatttccaggtcttgtcatggggcttctgtgcccgttgccctgggtggaaaccaggtcagcttcccctcccttcagggatacccactctcttttccttagatgcccgagactcctctcaggctgcagggaaatcgctgaatcccccgtgctcttctgggacccctgctgaatgcaccggatgttgaggactcagaaaagactagaaaaagaagcctgtccctctgggatgtggagtaatgaggaggaagcctcagaaagatgggaactccatgccctctctttctcctgcctatggttagagtgcaggggcaacccagcacccagctctttttttttttttttttttttttgagatggtgtctcgcactaccacccggcctggagtgcagtggcacgatctcagctcactgcaacctccgcctccagggttcaagagattctcctgcctcagcctcccaagtagctgggattacaggcgcccgccaccacacccagctaaattttttgtattttttagtagagacgggttttcgcctgttggccaggctggtcttgaactccttaccttgtgattcacctacctcggcctcccaaagtgctgggattataagcgtgagcctccgcgcctggcccaccaagctcttaattgcacataaaagggtttctggtcccagcttcttgactcaccagtttcccccagcctggggggaagtttgggccccaatgctgataattctttggggtccttgctgctagcatccctgccttcaatcatgaccgcagctcactctgctctgagatgctcctactctacatgcttatttctgggaaactccacccagcccttggaaggaaacactccccttcaagtctcttacactgctcctccttcctggcttagagtgtggcccgagatcctgagatatctggtcatctgttaacacagccggaaagaggacctgggtctctgagctcaggaggcagtgggcaccaagtctcctctgcaaagctgatttctgtccaaggtgactgaaacacaaagcaacagagaacggaatctcagatccctgtactgacacccccaccgccactctctgcttctcacagcttagcatgaaaagtgctcttggcttctcacgatgaagtggtggacatttcaaccgaggaaatgatttgtgtgactcttttcttggacaccgaggacaatgacatttcccaacagctttcattcatctccccagctaggtagctacttgtagttttaatgtggccaacaagcatatgaaaaaaaaatctttacatcaccggtcactagagaaatgcaaatcaaaaccataatgagattccatctcacatcagtcagaatggctattactacaaagccaaaaaataacagatgctgggggcagggggttgcagagaaaacggaatccttatacactgttggtggggggtgtaaattagttcaaccatggtgaaaagcagtgtggcgattccttaaagagctaaaaacagaactaccatttgacccagcaacctgattatagagtattcatccaaaggaatataaatcattctaccataaagacacacacatgagaatatttatcgtagcactattcacaatagcaaagacatggaatcaacctaaatgcccatcaatgatagactggataaagaaaatgtggtacagatacaccatggaatactgtgcagccatgcaaaagaacaagatcacgtcctttgtaggaacatggatggagctggggtccattatcttaagcaaactaacgtaggaacagaaaaccaaataccacatgttctcacttataagtgggagctaaatgatttgaacacacggacacatagaggggaacaacacacactggggcctattggaggctggagggtaggaggagtgagcggatcaggaaaaataactaatgagtactaggcctaatacctgggtaacaaaaataatctgtagaacaaactcccgtgacacaggtttacctgtgtaacaaacctgcacatgtacccctgaacgtaaaatgatattttaaaaaaatgaatacaggccaggtgcggtggctcctacttgtaatcccagcactttgggaggccgaggcagacagatcacctgaggtcaggagttcaagaccagtctggccaacatggtgaaaccctgtctctactaaaaatacaaaaattggctgggcgtgagggtgggtctctgtagtcccagctactcgggaggctgaggcaggagaatcacttgaacccaggagacggaggttgcagtgagccaagatcacaccattgcactccagcctgggcaacagagagagattccatctcaaaaaaggaaaaaaatatccaatccactgttgatgggcacctaggctgattccacatctttgctattgtgagtagtgctgcagtaaacacacaagtgcatgtgtctacctagtagaataacgtattttcttttgggtagatacccactgataggattgctgggtcaaatggtagctctgtttaaagttctttgagaaatctccaaactgctttccacagtggctagaccaatttacattctcaccagcagtgttcccttttctctgcaattttaccagtatttggttgttttttttttttttcactttttagtaacagccattctgacgggtgtgagatggaatcttattgtggttttgacttgcatttgtctgatgattaacgaagaggaacattttttcatttgtttgttggctgcttccctattcaataaatgttcgtgggataactggctaaccatgtgcagaagaatgaaccgggaccctgacctttcaccatgtacaaaaattaactcgagatgaattacagatttaaatgtaagacctcaaagtattaaaatcttagaagaaaacctaagaaacatccttcttgacatcagccttggcaaataatttttggcaaatcccaaaaaccaattacaacaaaaacaacagagtgagactctttctcatatttatattgagtatcacagtcttctaaataattccaatgtattgaaatataatgccctaatcctgatatttgttgttttaggtcactatgttttggtggggggctgacttgttacatagtaatagacaactattacacaggcttaagcacttaataaatatcttttttttttttttttttgagacagagtctcactctgtcacccaggctggagtgcagtggtatgatctcagctcactgcaacctccacctcccgggttcaagcaaagctcctgcctcagcctccctagtaaagtagctgggactacaggcatgcaccatcatacccggctaatttttgtatttttagtagagacgaggtttcaccatgttggccaggctggtcttgaactcccaacctcaagtgatcctcccgcttcggcctcccaaagtgctgggattacaggtgtgagtcctttttttttttttttttcttaagatacagggtctcactctgttgcccaagatggagtgcagtgtgcctggccttaataagtaccttttgaaagcacaaatgaactatacaattggagtttatcatacagaagcacagtccgactgggacccaactgtgtcagcgtcactcccagataccttgcctatcagcacttccttatgacaaccacgttaaaatcatatgttacctgttcatgaaataaatcgcaattaaaggacaactgctcaagttctagccaacttcttgggggtgagtctggggagaagtttagaagcaatatttctgacaaataaatagcgatatcgtgtggtactagtgttgatcgtgtttgtcatttattcagaaatgtttactgaaccggctgggggtgatggctcatacctataatcccagcagtttgggaggctgagacgggcagatcacttgagaccaagagtttgagactagcctggccaacatggcgaaaccccgtctctactaaaaatacaaaaactagctaggcgtggtggcacacacctgtaatcctaggtactcaggaggcttaggcacgagaatctcttgagcccgggagacagaggttgcagagagccaagactgcaccactgtactccagcctgggcgacagagtgagatgaaaagaaaggaagagagagagagagagagaaagagagagacagagagagagagaaagaagaaagaaggaaagaaagagagagaagaaagaaaaagaaaggaaggaaggaagaaagaaagaaaaaagaaagaaaaagagagaaagaaagaagaaagaaagggaggagggaggaaggaagaagggagagatggatggagggagggaggaaggaaggaaggagagctagagatagaagaagaaagaaagaggaaaaaagagaaagaaagaaagggaaaggaaaggaaaggaaggaaaaaagaaagagcaaaaacaaaaggaggggagtggagggggatcacgccactgcactccaacctgttgacagagtgagactccatctaaaaaaaaaaaatgctattttatattttattttttgagatagtctcactctgttgcccaggctggagtgcagtggcgcaatcttggctcactgcaacctccaccaaccaggttcaagtgattatcttgcctcagcctcccatggagctgagactacaggcgtgtgccaccatgcctggctacatattttgtatttttagtagagatggggtttcgccatgttggccaggctggcctcaaactcatggcctcaagtgatccacccacctcggcttcccaaagtgctgggattacaggtgtgagccaccgcgtccaggctaaaaatgctgttttaaacactgggaagcacaggaaaagatgctcaacattattggtcattagagaggggaaggaaggggcgggggaggggagagaaggagaaatatttactgaattatgtctaggctctcttcaagcaggtgtcttagatgggtctccagaagcagattgagataaagagcctggtgttgggcctattgttaagtgtgagccttaatcggagagggggtgcggttcactgggaacctctagaggacagtgtagggaatgcactgagttattccaggaaaagggctggagggtggggggttgaaggattcatctgccagcaaccatcagtccttggttaagaaccaatcaatgagaggttaatttcccaacacttctgggcttgtctgagaggcagagtgagatccagctacaggaagctctgcagcaaagagacgttggcagttggaagacaggatagtaaatattgcaacagcaatatgcaaagagttacaggcagagctctaacagaatctactataattgaataaacagaacaagaacagacaggacaaaagagatctctctgccttatggaacttgcagctcgatgaagaagacaaacgataaaggattgcgtaccctatctgctttcaataaactaggaaacaaacactctctcagagcaataaaatgctatgacaaaaactgatcatgggataaaaattatctgggatggggggctgtttagatagaggaggaagagcttggatgaaaaggtgccatttcagccaatcctggaatcagatgagactcagtcacaaaagagctgggagaaaagcattccaagcacagggaaccgcaaatccaaaggctgtgagagaagaacagagagtctattagggaatcagaattgagcccagggcggccaagtgcagagagggagggagagcagctgggaaggaggtttgaggggtctgcagggatcagtggtgccgagtcccttatgctaagagataaatgtttgtagcaggatcttattgggagacattcactgaggtttccttcagctcccacccccttgcacttccatgtgcccccatcgctttcagaaaaaaaagaagcgcctcctatatgcacagcagagagggcaggcagagctcattcaatgagcacacgttagaattcttggccaggcgcagtggctcacgcctgtaatccccaactctttgggaggccgaggcaggcagatcaggaggtcagaagttcgagaccagcctgaccaacatggcaaaaccccgtctctgctaataatacaaaaatcagccgggcgtagtggcacgcgcttgtaatcccagctactccagaggctgaggcaggagaatggcttgaacccaggaggcggaggttgcagtgagccgagattgtgccactgtactccagcctgggtgacagagcaagactctgtctcaaaacaaaaaacaaaacaaaacaaagaaacaaaaagaattcttgccggacaggcatggtggctcacacctgtaatcccagaactttgggaggctaaggcaggcagatcacttgaagccaggagttcgagaccagcctggacaacatggtgaaaccccatctctactgaaaatacaaaaatcagccatgcgtggtggtgtgcacctgtaatctcagctactcaggaggctgaggcaggagaatcatttgaatccgggaggcagaggtcacagtgaaccgagatcacaccactgcactctagcctgggtgacagagtgagactctgtctcaaaaaaaaaaaaaaaattgttgccattgatttccaagatacacaaataacagtctcaaaagaccttttgagatctgcaagagccaggctttctgaggcaggaagtaataatggccacgtttatagtgcattttctataaagtggcacagctctgagccccttatatttagtccctgggatgagtctgacgtaggtgctgttgtctccattatatggttgggaaaccaaagcacagagaagggaattaacttgcccaagtcacacagcagagctgaggcttgagcccaagcagtccggctccagatcccatgcctttgggtggtgtttgcatccagtggtctggctttgaatctctagagccaaaagggatgaccctgaccctgacccccccaaaaatgggccagggaggcctgtgctgggaatggaggaggaacttagaggtgaaaggatggggatgcaccttccccccgacactcttatgagagcacctggcacacagttgggagggaggggtgctcaggtagcatctgctggacaggctgcctgtgcagcatcagggacccagaagagaaagggactcagagcctcaatattgccccttaaatccatcctaaaacctggtccctctcctgctcaagcacctcccatagctccttattgcccacatgataaagtccattgttgggctctgaacctgcgatccatgtggtcagccagagaggcagtcagggtcttggcttcagagaccctgccccacttccacccacacacaccctggatccttgcagtccccaagcagcccctgctggctttagatgagactcaggcagaggtgacaaacattttattcctgggaatctgcaaaggtgggtgggtggggttagggtggatccctgcaggcctcagctcagtggctccaccagcagctaaagtccgccctccgcatgcatgatcagctctggcttcctgccgggctccatgtggtgccgcaggaagcggaagcccagcagcgtgagtgccaggaccaccttcatctcggccacggcgaacacctgccccatgcagatcctgcgggcagatgagaggactctgactgtgcccaagacccgcatcctggccccatcctggcaccatcccccaaaccaggcacagctctgagaggattactgtctgcaaaatagaaaagcaatgctgcaaaatgaaataaatatacattagatatatagcctaagttatgtcacattcatttctctttgcctttagagttcatagttaaatttttcattccaaaatgatgaatattcccataaaaaagacaagtaagcaaaagtaagaaatagaagttatccacaatcccatgtcaaaataagcactgtaaatattctctcacacgtccaggttttttatttatatgtaatctttttatctgggaaaatgcttattaatatctaaatttattacatttacgtgcaatatttttgtttaaaaatgctattttaggctgggtgtggtggctcatgcctgtaatcccagcactttgggaggctgaggcaggtggatcacgaggtcaagagatggagaccatcctggccaacatggtgaaaccccgtctctacaaaaaatacaaaaattagctgggtgtggtggcacactcctgtagtcccagctactcggaaggctgaggcaggagaatcgcttgaacccaggaggcagaggttgcagtgagctgagatcacaccactgtactccaacctggccacagagtgagactctatctaaaacaaaaaatgctattttatattttattttattttattttattttattttattttattttattttattttattttattttattttattttttgagacagtctcactctgttgcccaggctggaatgtggtggcgcaatcttggctcactgcaaccgccactacccaggttcaagtgattctcctgccttagcctcccaaccagctgagactacaggcatgcaccaccacgcctggctacatattttgtatttttagtagagacagggtttcgccatgttggccaggctggtctcaaactcgtggcctcaagtgatccacccacctcggcttcccaaaatgaattacaggtgtgagccactgcgttcagcctgaaaatgctgttttaaacactgggaagcacaggaaaaggtgctcaacattatttgtcattagagacaagcaaatcagaaccacagtgtgatgcttcttcacagcccctaggatggctggaatctaaacatgggaaaataacaaacatcagctagtatgaaagtgaggctaagagaagaactgttttaagattgaggaaatatagcattatatgtattccaacaggaatgatcaaatagagtgtaggatacacggtcaataaacaaaactcaattatatttctacatcccacatatttcactgttacaggtaagaactctttggccgggcatggtggctcgcacctgtaatcccagcactttgggaagccgagtctggcggatcacttgagcccaagagttcaagaccagcctggccaacatggtgaaacctcatctctactaaaaatgcaaaaattagccgggcatggtggcatgcccctgtaatcccggctactcaggaggctgaggcatgggaattgcttgaacctgggaggtggaggttgcagtgagccaagattgcaccactgcattctagcctgggtgacagagcgagaatctgtcttaaaaaaaaaaaaaacaccaaaacaacaacaacaaaaacaaacaaacaaaaaaacaaacaaacaaaaacctgtttgcctaacctgtatatcccagggatacagaaatatttcaacccccgggacatagggattaggcaaagagttcttaaatataatggcgtaaaagtaatccacaaaaaacaaaattgataaagggtacttcataaacattaaaacctttcgctctataaaagaaacttcagggctgggctcggtggctcacacctgtaatcccagcactgtgggagactgaggcaggtgtgttagatatgagttctaaatttcttttcaaagaatcaatatgtcaggatgttcaattctttgccttctacttttaaatttaacttcctcataaagcagccttttcggattacctgttccaccctgactcattcctattacctactccaccgtgactcattctgattacctgctctgtcataaccatttttcccgccaaaccactcatcccaccactctctttaaattagccaatcggaattagtttagcctgtgtggtctaaccctagccaataggggaacgacacagcagcaggggccacatgcatcaaggataagaaccccttcccctcccttgtccaagtgtgagctcaccattgctccatctgtaagggcgcacccttctatagaagtacctttccttgctgagaattaaaaagaaaattttatattcgagtgatatttcttttgcggcaccaaaactttacttataacaggtggatcacctgaggtcaggagttcgagaccagcctggtcaacaacgtgaaacctcgtctatactaaaaatacaaaaactagcggggcatggtggcaggcacctatagtcccaaggctgagacaggagaattgcttgaactcaggagatggagattgcagtgagccaagatggcgccactgcactccagctggggcgacagagtgagactctgtcttaaaaaggaaaaaaaaaaagaaaagaaaaaaaacagataatgaaaaggctagccgcagactaggggaaaatacttgcaaatcacacatctgacaaaagacttgtctgcaaaatataatctataaagaactctcaaaatccaaaaataagaaagcaaacaacccaaggaaaattaatggacaaaagattagaacagacactttaccaaagaaaatacaaagaaggcacatgaaaagatggagaaatgcagactaaaatctctgtgacataccgcagcatacccacaaggaagactggaaaaaaaaactgacactatcaagtacaggtgagtatttggaggaactagaattctcataccaatacaggagctagaaagaaattattttggcagatagtgaggataagacagttatcagtaaggtttccttttcataaaaagcagcccccaagtcatttcttttctaacaaaaagcagcctgaaatatcaagctgcaagcacagataagcaagctggaagtttacatgggtaaatgccggcagctgtgccaatagaaaagggatatctggaagccaggtgtattcaacttggaggtttcctcttcccttttctttgtcaccatgtgtgtagtgaaaagcaggcaacaggtagaaaaagcaccggccaggtagagacccctatctgcataataaaagatcagggtgggatagccagcttcctcccatgctatgcaaacagcacacctggtctgaccaatctttcatgccctatgtaaatcaggcactgcctcctcaagcttgtctataaaaccccatgcgtttcaccacaaaaccacaagacccattcaggagcccctctttctctgcagaagagagagcttttctcttttctctcgcctattaaacctccactcttttttttatttttattttttgagatggagttttgctcttgttgcccaggctagagtgcaatggtgcgatctcagcttgctgcaacctctgcctcctgggttcaagtgattctcctgcctcagcctcccgagtagcacactacaggtgtgcgccaccacacctggctaattttttgtatttttagtagagacagggttttgccatgttggtcaggctggtctcgaacccctgacctcaggtaatccacctgccccagcctcccaaagtgctggattacaggcatgagccactgcgctcagcctaaacctcaactcttaagcttacttcttgtgtgtcggtgtccttgatttccttgatgtgagatgatgaacattgggtatttaccccagacaacaacgccacttcaatacattcctgataggaattaaaaatgacatggaccttttggaaacagtttgatagtttctcatcatggtaaacatacactgataatatgccccagccatcccattctaacagcaatgggaatttagtttccctgaagaacctgtgtacaaatatccataacagttttattcataatatccaaaaaccagaaacaatccacttgcccttcagccactgaacaaagagtgtcctatccatgcccagaaattctacccagcaataagaggaaacaaggttttgatacagacaacatgggagactctcagatgctttatactaagtgaaagcagcaagactcctaggctcccaatggcataaccccattcacacaactataggaagaaagcaaatctatgggaagacagaaaacagcagtggttttcaggggtcaggagtggaaggaggtttttgaccaccaagggtggctgtggcagtagtggttacatgactctagccatgtgtcaaaactctgaactatctcacgcctgtaatcccagcactttgggaggctgagggggcagatcacctgaggtcaggagtttgagaccagcctggccaacatggcaaaaccccatctctattaaaaatacaaaaattagccgggtgtggtggtgtgcacctgtaattccagttacttgggaggctgaggcgggagaaccgcttgaacccaggaggtggaggttgcagtgagctgagattgcaccactgtactccagcctgggtgacagaatgagactctgtctcaaaaaacaaactgaactaagcaccaaagaaaacaaattctgaaaatttaatgtgattttaagatgagccatgaaaatacaggagtggcaagtaagcacactcattgtaatgtaggcatgctaatatgtaattagggtgactaattacatatattgtttggctaaatatactatgaaaggatgcactaggtgtgaaagtatttacctttatacacatgaagaaactgggcagatgaagggcatatgtagcaccattacttctcactgggtattttattttttacacgagtgaatgtacttctggtcaacaatattatatttaaaaacttggggctgggtgcagtggctcacgcctgtaaccccagcactttgggaggccagggcaggtggatcatctgaggtcaggagttcaagaccagcctggccaacatggtgtaaccccgtctctactaaaaatacaaaaaattagctgggtgcggtagagcgtacctgcaatttcagctactcgggaggctgaggcaggagaatcgctggaacccggaaggcagaggtttcagtgagccaagattgtgccactgcactccagcctgggcgacatagtgagactccatctcaaaaaaaaaaaatcgggactgggaggaggggctcacacctttaatgccatcactttggccaggagtttgaggttgcagtgagctatgattgtgccactgcactctagcctgagagactgagggagactctgtctcaaaaagacaaaatgaattaaaaaagaaaaagaaaaagaaaaagaaacaaaaaacaaaacaaagcaaatgtaggcaccacctgtcaaagagtctcatctactcagtctagagtctgtaggggttcccaggtaatctgatgtgcctagggctgagactcgctttgaaaatcatgtccttgatacgataaggcatgacctctgatgccaactgctcagattcacccctgactccacccttcactgagtgaccttgaacaagtgagttcatctacaatctgtaagatcgatgtgaggatgaaatcagcatttacctgggggagctgaaaagtcaccttctcccttctcagtgatctacttctgttaatacgaccaaaatattcagtgtctgtggaatttccagatcataactgttctatgaaaggtgtctaaccacacctgtatcttacatgaatatttgtgcatctattgctgtgaaaatgagatctctaccccaaaagttacttgatgaagaataactcaatttgttactaatagtcaatgtatatgaagctaattcttacaaagtgagacaaaacacttttattttctaatatgatgtctttttttaaattaagactgatttgaacacttaacacacacattttgaggaccacaaaataatgtttcctaagatgatttaatgtcatggaaagatgctcacagcatattattatatgaacaacctggacagaaaaaaaatgtatgtgagataaaatagcaaatttttttgattgaggtagaattcacataccacgaaattcaccatttcaaagtgtccaattcaatagcatttagtgcactcacagtgtcgtgctaccttcgtcactatctaggtccggaacattttcaccatcccgggaggaaaccccatactgattagcagtcgctcctcagtcccacctccccacagctgctgaaagccaccaatccgctatgcatctcttcagattggcctgttctggaaatttcgtataaaaggacagtacactatgtgaccttttgcatctgacgtctttcattcagtatcatgcattcaaggttcatccacagtgtagtagggatcactgcttcattcctttttatggctgtgtaatactccattgtatggatggaccacattttgtttatcctttcatctggtaatatatagcttggggttgttttcatcgtttggctactgtgaatagggccgccatgaacattcacgcacaagcgtctttctgtttgaacacttgtctcaattattttgagtagatatctaggatggaatacaggactgtggaacagggtcttagggtaattctaggcttcacttttgatgaatcaggggtcattttagtggggtcagagtgggtctctgcagaactcagctcaggggctccacccgcagccaaagtccgccctctgcgcgcaggaccagctccggcttcctgcggggctcggtgtggtcaggcaggacgcggaagcgcagcagcgtgagcgccaggaccaccttcatctccgccatcgcgaacgtctgcccgatgcagttcctaggggagggaggtgggaactctgactgcacccaggagccccatcctggccccatcaagccggtaacctggcctgggacacccaaccccacctagagcagtttgaggaatagagaagggggtatccgtgcctggatccccatgcgggcttgcatatcctgcaagcctagccgagctccaacccccagcctagaccaaggtggggtaggagggggctctgagcacaccacagacccttctaggaccaacccaaccgtactctatggaccttttcctataaactccagaggaggtgagggaaagagagctggaacttggaccatctacaatgtcccccttttccccactgtcatgcccagacccctgcacccatcaacccgttcccacctcagacacaggccgcccttacctgggccctgccgagaagggaataaaagccagaggtgacctctccttgatgttctctgggtcaaagcgaaaggggtcgtagacctggaggtgagaccaagaagggttgttgggtggggtctcccagtccgccagccttggagagacagacagttgtgtgtgtctttgagggaggtgatgttggatactcctgatcaaaaccctgccccctcctctaggagccttggaatggacaaaaacagagagaggggccccgcacctcagggtccggccacacagctgggttgtgatgggttccgaaaacactgatgaggcagataatgcctgtgggagagaagggagcagtcaggagaaggcctccttcactgaggggcccctcttcctacccaggagactcctccccgtgaggctgtgagcacctttggggatgacccggccgtctgggagcacaatgtcctgggtgacatggcgggagatgaccgggactgggggatgcagccgcaggctctccttcatgcacatggtcaggaagggcaaatgggccaggtcgtccctaaggaaacaccccagccccaatccttatcaagggagcaaagacacaattctccagcttctctctgtttgcaagtgagaccttttctccccgcaataaaataaacttttaacaagaattgttacaaagtcgcaagaataaaaatagtgtggcactgtggcaaaaatgagaaaacagacccatggaacatgagggagagctcagaaaaagacatgagaataagtgaaaacttcacatttgataaagacagcccctgctcaaaccaaaatcctgggaaactgatggattttacagttgtaaaagaaaaaagtggatcaatttaacttcacagaagttgaatatgctcaagatggtagtttttgcagataaaggatagtaatgaaaagtaccctccaaaagttgaaaggcaatattttgcaacccaagacagaaaaaaaaaaatcaattttggctgggcgtggtggctcatgcctgtaatcccagcactttgggaggctaaggcaggtggatcacaacatgaggagatcgagaccatcctagctaacacagtgaaaccccgtctctactaaaaatacaaaaacttagcggggtatggtggagggcacctgtagtcccagctactcgggaggctgaggcaagagaatggcttgaacctgggaggtggaggttgcagtgagctgagatcacaccactgcactccaacctgggcgatagagactgcatctcaaaaaaaaaaaatcaattttaatacacattcttaaaagtaaatatttttaaagaatccaaagaaaaagagcaaaaaaataaaggaaccacttccataaaaagaaacaaacatcaacacgtgaaagagatgttcaacctcactcttatttaaaacaatgtccatcaaaagaagaaatatgaagattggcatagattttaaaatttaataatacattagtagtattggtaaagttatgggaaaacttgtgccatcaaactcagctaataggaaaggatttgcaatgataattaaaattgtacagtgcaaatgttctttgattcagcaattgcacttcagggaatttgtcctgcagagatgcttatacatgcaaggaatggtcactgtgcacacatgctgactgcctcatgtccacttttagcaaaaggttggaaacaagccacatacacattgatgggaagatgtttagataaacagccacacgatggaatactatacagctacacaaaaggaggaaatagggatcactagtctcatcacattctgcaggctggaaggtaaatcagtacagacactgtggaaggcaaattggaaatatctactataactgaaaatgtttatgtgcattcaacataggaatgagctgaataaataaggaataaaatatttagcattcagaaaaaaatagcattaagacacactgtcgagtgaaaacaagttacaaatatatacatttgtgcacataaaaagggcaaaaagtatatgaatatatatttatgaaattaatgattcagagatagatgatagattgatagatgacagataataaataagagatatagagagatagagaatagacagatacatacatagatgatagaaacagagatacatagatgatatatagatagtagataggtatatagatacatagatagatgatggatagatagatagatagatagatagatagatagatagataacaaatctatggctctggagacacctttggagaatgagaaaggattaggtggggtggcaggattgtcaaggaaaaagctagtcttatctgtaatatctcatttggtgcaagaagaatctgttcttatcactggttttataatttaatgctcattttccatgtggtgtgtatatacaatggaataccattcagccttaaaaaaaaaaaaagaaagaaaacttattttgtttgccacaacatgaaagaacctggaggaacttatgctaagtgaagtaagctaggctcagaaacacaaacacacatgatcttacttatcttgggacctaaaatagtcaagctcatagaaacaggagtggaggtcgggcgcggtggctcacgcctgtaatcccagcactttgggaggccaagggcggcagatcacaaggtcaggagttcaagaccagcctgtccaatatggtgaaaccccgtctctaataaaaatacaaaaaaattagccaagcgtggttgcgggagcctgtaatcccagctactcaggaggctgaggcaggagaatcacttgaacctgggaggcagaggtcgcagtaagctgagatcgtgccactgcactccagcctgggtgacagagcgagactccatctcaaaaatgaaaaaaaaaagaaagaaagaaaagaaaagaaatagaagcagaatgatggttaccagaggccagggctgagggagggatagagaagggtgagatgttggtcaaaggatagaagcttcagttagacaagaggaatagtttttgagatctactgcacagcatggtgatttagtgaacaatgtattaattgaaattgctaagagagtaaatttcaaatgttctcaacataaaaatgataaatatatgaagtgatggatttgttcattaccttgatttaataatttcaggttgtatacatacatcataacatcacattgtacctctaatatatatatgttctcaacataaaaatgataaatatatgaagtgatggatttgttcattaccttgatttaataatttcaggttgtatacatacatcataacatcacattgtacctctaatatatataattaaaatttatcaatgaaagaacaatttaaaaacaaactcatttttgaaaactcgtattttaagaaaaatagatctcagagataatgtccagaactgcgtctattttgtatagttttctttacaaagaaaaacacagtatgtgttcatataaataaaaatcacagtgtgaattcatataaatgtgggcattgggatagccattttctggaagaatacacagaaaactgttgaccatagtcactgctaaggtggagcttaataaggaagctcatttttatcataaaattttttggaccctttcttttaaccacatccataattttgcttgaaatctggattttatactccaggacatgggtccaggcaaagattttctgtgttaagacctcaaaagcacaggcaatagacaaatgagattacatcaaggtaaaaagcttctgcacagcaaaggaaacagtcaacaaagtgaagaatcaacttacagaatggcagaaaatattctcaaattactcatctgacaagcgattaataaccagaatatattatataaggagctcaaataactcaataggggaaaaagaactcaaatcatcttatttaaaaatggtcaaaagatctgaatagacatttcttaaaataagacatacaaatggccaacagatagatggaaaaatgctcaatgtcactaatcatcagagaaatgcaaatcaaaaccacaatgagatatcatctcatcccagttaaaatggcttttatcaaaaagacaggcaacgatagacactggtgaggatatggagaaaggggaactctcacacactgttggcaggaatataaattagcgcagccactgcagagaacagcacagaggttcctcaagaaactaaaagtagaactaacatataacccagaaattccactactgaaaagaaagagaagaaatttctatcccaaagaaagaaaataaaactgttgaagagatatctatacttccgtatttattgcagcactattcaaaacagccaaaatatggaatcaacctaagtgcccatcaactgaatggataaagaaaatgtggcggccgggtgcggtggctcatgcctgtaatcccagcactttgggaggccgaggcaggcagatcatgaggtcaggagttcgagaccagcctggccaatatggtgaaaccccagccctattaaaaatacaaaaattagccaggcatggtggtgtgcacccatagtcccagctgcttgggaggctgaggcagaagaatagcttgaacccgggaggcagaggttgcagtgagccaagatcgtgccaccgcacttcagcctgggcgacagaacaagactctgtctcaaagaaagaaagaaaggaaagaagaaagagagaaagagagagagggagggagggaggaaggaaggaaggaagaaaggaaatgtggcatgtatacacaatggaatactatgcaccattaaaaacactggaattttgtcatttgtggcaacatggatggaactggaggtcactgtggtaagtaaataagccaaaaagagaaagacaaatatcgcatgttctcactcacatgtgggagctgaaaaagtggatctcatgaaagtagaaggtagattggtagaagggagggaggggtgaggagaagttgattaacgggcataaataagaggtttgataggagaaataaaacctagcacttgatagatcagtgggttcactatagtttacgatatgtactgtatattcctaaatagttagcttatgttagttatgtttctagcataaagaaaagactaaatatttcaggcgacagatatcccaagtacactgatttgatctttaccagttatatgaatgtattagattatcacatgtatttcaaatctatgtgcatctatttatgcagcaataaaaaattgtttgttaaaaatgcagaaaaattattggttttaaaagcagaaaaatgtttctcctcctcactggactgctgtgctgggcaaaggtgtggacgagaggacactgaatccaagacatccgtccattccaatgcttcctctccttcctccagcccctggcctggctctggtctcagaatgtccccactgtgccttcattctacagctggtcctctccagtacgccctccacactagccctagaaagatcttcctggtacccagatgtgacctgtccctacactgctcaaacacttcccatggctccctattgccattgggctaaaactgaagccattaacattttccccaaggcttccacagccagcccctgctaccatctccggttttatcatctcattacaactcagtctctccctctctctccccttctcctcctttctgtcctgaccctgctctctctctctctccttctctctctctccctcgctctcctctctctcttcctccctctctcttcctcccccaaagaccccaggcagtcttcttgacctagagcactgccccccaactgtacccaattatctactgatcattatttaggctctcaactgagacactttctataccccctagtcctgcttctcttactgtaaatcccatctctgcccatgtgggctgggagtgtcctgcccagggacagctccaccaccaggctgggagcacctggaaaacagatccctgggttggttccttcccaggtctccagagcacagaaagatgctgtgcacagatgtgggggtgaaaatgcagtgtgggagtgtttgctgaataaggatgggacggatgaacagtgcaagtgttccggacaagaatggatgaattttacccctaggtctcccttataaaaccctggactcgactggagagtaggaattagggaacagaagagcaaacattcaagaagtgaagatgttcaaaaaaaatgatatttctgggaggaaaggaagagagtggaggggaagttcatttgctgaacacgtctaagtggcgttatctgtcctcacatatcatcaccaactctctcagaagcccaggtctttctgtcctaagggcctataacctttccccagacagtcaggatgggtactaagtcctgcctgtggtcctctgctcctattcccactaggcaatagtggcagaatcaacaaaaacagcttttcctcccctccccacctggggagcagagccaatgagaaggtctcaggaagaggccacaagcacctgcactcaccattcaatctctttaggctcacggtccttcagaagttcttgcacctcctgccggcagcgctcctggtattctgggtgctttgcaaggtggtacaggacccaggagagaccactggccgtggtgtcatggcctggggggcagcaaggcaggcttgggtctctgggctgcttcagcacccgaaggtagacagcacccatgcattgagggcctcagggaggatgggggaagggggatgggaaggttgtgggggtctacccaccctgttcctggaagggagagatcccggtcccctctctagccccacactggggccctcaccctcaaacataaaggtgtcagcttctgctcttatgtcctcatcagataacttcttcccgtcttcatcctggagagaaggcagtaaccccccccaacccccacccccataaaaagtcacactagctctaagggctcttgagtctaatctgagacagtctctgaagattcatcctttttccagaaatccaagtccatcttgcactcctagacccctcttggtcaccatggccagagccctcacctcatggccttcctctctggcttccttgcctcctcttgggttcctactgggaagactcaatgacccatgaatattttaatgaaaagtttctgagaaaaagttactggcaacctgagttacaggagaattaaatggcaatttcccttggaaattagagattaagtattgcttcaaagatttgcccacattctagagtgataaatctagagaatcttatccccctggagacgtttgggttgtaaggctaaggactatggcatctcactgaagaggatttgtttatgctccagaacaaagcacaccatctctcacaaagctaccattctcactcaatctctctctctctctttctctgtctctctcattctctttcttgggaagaaatagaaaatgtgccaagactcataatgtagggcccctctcttaggatgcaaactctgctgcacatacaagtgaaaacattacccttggagaaatttgacttgaggatgaagagccagtgccacaatcccactctggctaacagtattgctgtgagcaagacatgggctgctctgatctagaggtttaatgcatctgtcacaatagacctacacatagacaaagacatagacacagacacaaacacacatagacaaagtcatagacttagaaactgacacagacacacaaatacacataaacatagacataacacagatatagacacagacacacacacataaagtcacagacttagaaacacaaacacacaaatacaaataaacatagacatagacacagatatagacacaggcacacacatatagactaagtcacagacttagaaacacagacacacaaatacacgtaaacatagacatagacacagatatagacacagacatacgcacacatacacaaaaacacagacttagaaacacagacacacataaacatagacatagacacacacacacatagacaaagtcacagacttagaaacacagacacataaatacacataaacatagacatagacacagatatagacacagacacacacacatagataaagtcacagacttagaaacacagacacacaaatacacgtaaacctagacatagacacagatatagacacagacacacacacacatagactaagtcacagacttagaaacatggacacacaaatacacataaacatagacatagacacagatatagacacaggcacacacatatagactaagtcacagacttagaaacacagacacacaaatacacgtaaacatagacatagacacagatatagacacagacatacacacacatacacaaaatcacagacttagaaacacaaacacacataaacatagacatagacacagacacacgcacacatagactaagtcacagacttagaaacacaggcacacaaatacacataaacctagacatagacacagatatagacacagacacacacacacatagacaaagtcacagacttagaaacacagacacacaaatacacgtaaacatagacatagacacagatatagatatagacacagacacacacacacatagactgtcacagacttagaaacatggacacacaaatacacataaacacagacatagacacagacacaaacacacatagatgaagtcacagatttagaaacacagacacacaaatacacataaacaaacatagacatagacacacacacatagacaaagtcacagacttagaaacacaggcacacaaatacaaatacacataaacatagacacagatagacacagacgcacacacatagatgaagtcacagacttagaaacacagacacacaaatacacataaacatagacatagacacagacacacacgcacatagacaaagtcacaaacttagaaacacagacacacaagtacacataaacatagacatagacacagatatagatacagacgcacacacatagatgaagtcacagacttagaaacacagacacacaaatacaaatacacatagacatagacacagacacacacgcacatagacaaagtcacagacttagaaacacagacacacaagtacacataaacatagacatagacacagatatagacacagacgcacacatacatagactaagtcacagacttagaaacacagacacaaaaatacacataaacatagacatgacacacactcagacacaactactgatagacataaacatagacatagacagaaacagacacaagcacaggcacagacaaagatatagacatagcattgacatagacatagccatagacgaagacatagtcatagacacagacaaaaaacatggacatagacatacactgagacaaagacacaaacacagaaaaaagacaaaggcatagacgcagacacagatatacacatacacatagacatggatgaaaatatagacagagacaaagacataaacagagacatagaaaagacaggacaaaggcgtagacatagacaaagatgaagacatagataaaaagacatacagatatggccaattacaaagacaaagacatacacatagtcacagtcatagagacacaaactcaaacagagacaaagatatagaaagacataggcaaaaacataaacatagaccagacatagatatagatgtagatgtatggagttaaatgtggacaattaactcattagtttgtaaatagagcaaactctcagacttgtcagtttcaagcctagcagctccctgctaggtgcactccacagtcatctctaaaacctatctctgacctgtccctcccttcctcaatcaccttccatggctccctagtgccctcttaatcaagttcaaatcctttcatctgacatttcacatgaagctcccttctacttcttgaattcagatcccagagaggcccaccttgctcagcaggagtacatcaatgaagtccaaagtcttggatttggccttggcttggaggaagtcatcaacaccctggctagggagagtgcggcgccgctcctggatgacggcatctgtgaagtcgtgcaccaggcggcaggccctgcggaaacgctgcccatcaggggtgagataatacaggaagtcaatatgcaggaggatctcatggtgtctttttgatacaagggcactgagctccaagatggcggcaatatattcactgggtttcctgcaggataagggcagaaagggaggcaacaatttaatatacctgaagccccaggatcacctcccaccagcagccaggatctacctcctatcagtaaacagagtatccaggaacagatgaccccacagatacagggtggggatcagcatgagattgattctccaagctctcttctctccctgcatcccatctctgtgagatgcctccatgccgctaggcacccagagcatagcttgcacattattctcctattctctctttccctcccagtatacagtcctgacccgtctccttgaaactgtccacaaagctcagactttatcctcctgcaactggtccatggtctagctttcaccctagcctctttgcatcagtgttaactccatttagtgctacattagtcagtcccctacagagctctgaccacacccaccagttcaaaccccttcaatggctccctggaaacctcaagataaagttcataccagtccttcaatgatcaggtataacaaaactcctccaggaaggtttgtctggtttccctgcttagtcctccctctcccacctacccactttgggtccacagcccaagatcccagatcctgggcaagaacttactcctgacaatggctgtcaaagctgaagacacatttctgtagactgtccaaggtcatgaggctgatgtgctcaaacatatccaaacaggcactaccctctgaggccaggagctgccacttggcctagccagagaaggggacagagctggggcaggctccttgctcccttgagcacctctccaaccccaactgccaagatgggctccccagaataagcctcttcatcttctccccagggacccctccccagggagcaccaggttatggtgcaaacaaaagctgttactattaagagatgaagacccaagattgggagttaggagaactaggttcaagttccagctctgtcccctgtgctctgtgtgccattagtcaactcattaccctcccctatatcctgcctgtcaaatcttcagaaacagttaagatgatgtgctttggagccatataattcacattagaaactctgctccacctcgccatgctcacttattagctgggtgaacttgggttagttccctaatctctcagacctgcagtttcatcatctaccatggggcaaaaatacataatctctccttcgcagagctgttaaaatcaaattagacaatacatactcgtatcatggaatgggcacatggcattgtttctggcatatggtatgtgatcaataaatgttggatttccccgtctgcattgttataaattgatttcaaaaatatccctgttttgggggaggtagtccttcgttgagtcctgagcattctttctgggcatgtcatgaatgcaagacactgatgtccttaacatggaaaatttctcagagttgtgtttgcgaagaaaaactttgagggataaggtaaagactccctctagacatgttgcttttgctttctataaaagcagattccctaagcttaaagctcctcttctgtaatgcaatatatgatgtcagcaggcacttatagaagcccacctgtgtcagcccatgggatttgggaagcttggagggaaaaaaggcaatctaacaagaaacacatgctgctgtctgtgtcatgagtagtaaactatcctttgtctctgacccaggagtctctcgtccttctggaagaatttatgaaacagtaacaagctaacttatcaatttgcaagttaaaaaaaaaatcctagatacttcgcaaaacctttgccacaattcttcccttcctgccatatccacaccctttgcaatgtgatttttcagcaactcccattaatagacagagcctattttatccccctgcctttgattctgtgttggacttttggctttcgatgtcaaaatacaatgtggtgaaaatgatgagttaataactaacgaagctaagccttgtcttactccttggaaccctgcctgcattgtgaaccatggcgcgccttctggaaggagacaatcatagggaggaacatccaggggtcccagatgaggccaaacctagacacgtgagagaacccaaacatgtcccagccaaaacccaaacatgtggcagaattcagtcaacacctgcaaggctgcctacctgacccccagctgctcatgtaccatgagtggtcccttccatatacagaagaacctgccaactgtcccaaagacttattagcaaacataaacacttattggtttaaaccaatgagttttcaggtggtttcttatcagcaacagctactatgaaattgttgtcatgaccctcttgtgtttacagggctttggtgatggaaacatagaaacagacaccttctgggcacctgctatgcaccagagacgtgactccattacattactctgaccatcttttaagtagggattattatccccattttacagatgaggaaaccaaggctcagtgagaaagagcaatggcccaatggcacccagcagagccaaaactccagactagatctctctgttgtcctttcaccccaaggctgcaagtgggaccttggcttcaaataactcacgtgcatgatgttcacactctcattgaaaatcttcatatagggcttcaggatgttgaaatggaaggcaggcgtcagcatccgacggtggcggctccacttgtcaccagcactcagcaggagcccatcccctagcagggcagccaagggccatgggcaaggacctctccctcccctggccccccaacgtttttcccaaccctgttcacctgcagatactcacccagccagggctccaggaagctgtagaagaacttgtcctttggtgcaatggcagctgacataaatgaggacaatcaggggccatggaggcaggtgaaagagggactttgggggtgggtggaggctcccagcaagaggtttgcacttctcccactctgagccccacatagcaggaagagggccaagggcagaggaagaagggaggatggggaggggagggaagaccagaccaggctacagcagcacagtacagcaatgacactgcctaacatggcgtgtaggagctatgtcagggttccagcatgccttgacatgcctcctacacgatccaacatgttccgcaacccctgagcacagctcagcattctacagaatgcttcacaaggacctaggacaccctgtctgtcccagcactctctgacatcttctgatatggcatcttctgacatggacctggacatgagacatgaccctgacatgtgttcacatgtcctgacatggccacaaaatacatgacaattcctaacatgagatggtgtgctctaacatgcacatgagatggtctaacatgatcttaaaagcgtgttccacatacaggctctgggttgaatataaatatggtacctttaatgtcacagacatagccaacatgtgaaccagactgttcctcaggcatgacccaaatatactataacacatgcctcagacaagactcaaataatgtctcagacagttcacatagggaccctgggtcccagacctcacacaacccccagacctcacacaacgcccagatgtttggaccaccaggagaaaacggcagtgtcaaacagcacctgagacaagaaccaaacaggccctcacatgccccaaatgtccttggccacagataagccccaaacttgaccagctctacatgaccccagttggaattatataccagatgtaaccaggtataacatatttcaggtgtaaccaggacccaggtgtaaatatacaaggcagacctggccatataacagccattgtagagacacgccccagacatgagcaaacagcaacagaggttagacaggtggaagtccaggggcgatggaggcaatggcatctccaccacagcccctcctgtctgcacatcggtcacgtgttcagctggaggcagcacagcaaccccagctgtgggcaaagcttggccagtgcgatgtctacctggagcaaagagcacaggcttgatgcacgtggggagaaagatgtggatgactgcctgccagggccccacccaccagcagcccatatccccaaaggtgcacgccaggctttgtgtgtataggagaccttcttctgagctgtgaatctggagaaaaacacacaggacccaattcatgctctcctaggctgtgagagagaaggatctgcagggaagaggtcgaagccctctccctgagaatttcaagcagcatctcatcctcctgtcagtgctgagcaccccctgcctcctcacatcctccatgcaggactctccagtccttcagttacacagacagaaaaggtctttccccatgtggatccacacaccatgttccctgggctctcattcatcccattttccagatgaagagcctgaggctctgaacaataaagtcacttgcccacagtcccagaccacggcaagcctgaggcctaagactaggtctgtctgcacccatggcctgaatccttaaccaacaaacttctttgtgcccccaaaacagtagctctggaagacccaggcctaccaagactgggcaatcagagacacagggattgggtgaaaaattggtcctgtgatccaggccaggagaagtaaaccatgggccatttctgggaactctaggggaaaggtggcctttcccataagaactgagcttctgggactcatcgttgacatcatgaggaaaaggccaccttgataggaaaagcgacatggagaaagctaaagccaagagagaaagacagatttccagtgaccttgtgtgagacctggatccagccatgcctgaaggccaccctccctggactttaaagtcaatagattatctttctttgcttagaccacaccaggttgggtttccaccactcacaactgaaagagacttcaataaccagagacagctgggtaccagcccagagtcactcagcattttgaggtcagagccatggtctctgtaggatgctgcccattccccctgctcagcctcgcccgtccaacgatgggaagcacaggggtcaaggaaagggacccaagctggggtggagtctcctcttggagatccccgggacctgcagcaggagagcaacgaacttagggcagacaagctataggatggggtaaagggaattgacccaccagaggtggacatcatggaagtagcagcccagatcccccaccagccacaagtcctcctcattgttctaggctttgggacaggcaaggtgatgctaggcctggcaaggggccttgaatactaacgatgtccaattgcctcaccctgcactctcctttcaaacattcctactcattgttccagacacagctccagtaactcctcctctaggaagccttccagcctgccccagcagagaccttgttcttccctgggctgtgatccatctccctctggccctttcctgatcccatgaagttggggatatctctatccaggtccatctccttaaagttgggggttcctccaggactgggccttgggttgaggtctcttagggttccagggcagcccagaacaccagaacagggggtagatggcaatagagagaggagacgctgagatggaaattgatgaatacatgaaagaaagatgaagatagctgagagggaaggaaaggagaggccagagtactgcagggcccacacaggagcttggggatagcggaagtgcaggcctcaaatgcactgccccaccagctgttccagatggtacctgaggcgttgatgacagaccggatgatgtcggggtggcacaaactgaggaggggggagatgggtcccatccagaccttaaagccctgggggtaggtggccaccagctgagtcagaactctcatgccctcctctgtggggttgacctgcaagcaaggcaggggtcattaccttctgtgatagttaattctaggtgtctacttgactgggctaagggatgcccaggtagttggtcaaacattatttctgggtgtgtctaatctattcatcctatctatctaatttttctatctatatatctatctgcctacccatctatccatcaatccattttatctgtgctttcatccatccatatattcatctgtctgtctgcttatcatctattaatagccatctatccgtctaatctatccatcatatatatctactccatctgtctacataatctatccatcctatctactctatctacccatccatccatcatccatccatccatccatcctatctgtgcatccgtgtgtccatgcatccatatgtcctattatttgtctatctatctatccatccatccatccatccatccatccatccatccatgctatctgtgcatccatgtgtccatgcatccatctattctattatctatctacctacgtgcctgtccatccatccatccatccatctatccatcctatctgtgcatctatctatctatcctattagctatctatctatctatctatctatctatctatctatctatctacattcctcctgctctatctatctatctatccacattcctcctgctctatctctcttgggtccatctccaagtcccaagggtgcatcccagggcagagggagaagacgcactgtccactcacagaggcccagttatcttgagaggaaggattttctttttctgggagtcatttcagcccagaggcagctatatggggaggtcctcacaggggagatttgtggggagcagtatcgcctcaggacatgtccctaaggctggtccccacatgccttcatgtcctggctgatccacagaggctccagttcctcccatggagaaggttctgcacatgggagaccttcccttttcagcagccactagtggagcagaggtgactctaactgtccatcaggacaatggctcccacctgggagcagcttctgcagcaggctctgtgctagtgtgtcctgtgcacccttccactttatctgtggacacatccatcaatcctgccatttgcaaatgagcagactaagaccacattccccaaagaggagagcggtctaagtcagagggcaaggtcacggggaggagaaaggccaaggaaagcttctgaaaggtgaagtgagtggccaacttttatctgggtttggcaacaggtctcattgataagagggagataagaagaagaatataagagaaaggtgccttcgggtgtagtggaagtgggagacggcccatgcctctcctctggcccagctgtaccctcataacaggaaatagtccaggcaaggagaggaccctggacagtgggcataagaagcctcgagtccagcaatggagaatgtgggaatgccagggactcgcctctctgtgcagccaaccctctgcccaggagccccgcagaggtgcattaatgtgggaagacaggcaggaaaaggattcaatgcaggcctggagtgggaggacaaggaagtgagaagggcttgcgtaggcacctcacagaaatgaataagcagaggaatgagtaagatgcctcctctgcttctctgccaccccagatcccagcccaccccttcacccccactccctaagcctcgtacccctcaggaagtccatccatcctgagacctagacccatcctgctgccacactcaccatgccctggtgtccccaaaaccagttccgtcttgggggttgtgggaaacaccgaaggcggcggcagttgtcatagaaggcgtaggtccaggccaggacatgggccaggagccaggaggccccgaccagcaggaggagcagccaaggggatgctgccactggccagaggcccagccaggacaggctcagctgggacatcctgcagggcagacgggatggacggtgagatcctgaggcccagagaacggcccagggacctccagggacagtggagaggcagggacgggcagtgccggaggtagagcagggagggctcagggatgggtaaaaaggggctgagaggtaaagtccagaaaggcccaaccaaaaccagcagccaagtggcctccagttccctagtaagcacttagaatgggaaagagagagagagactgattaaagtccagaaaggcccagcctgaatcactgtgaggttgccaggggcttggtttcagttactcggaaaccacccatcctccaggccagcacccaggagctgcgtgggccttgggcagtgcccctctccatcccaggccaggaccccccccaggcctgccacccccagcctggcaccttctgtcaggagcagtctgtcccagacaacctcctctctctgtctgctgggaggcctttgaccctggcccttgatatagcaaaggctgtgggagggctggctgggttgggctgggccaaccaatccctgcagcctggatgtgtctcctgagcctgggcagccaatcaacacctggcgtcaggccagctgggtgcagaggaatcagctcagggtccagatggatgggtagatgcacagatagatagagtagataggatggatacattaggtagatagataaagtagatatagataatggatatattagacagatggatagatagctattaatagatgatagatagatacatagataataggataaatagatggaatggataaacgtacagctaagatggattgatggatggatgggtaggcaaatatatatatagatgagaaattagatagataggatgaatagattagatagacacacccagaaataatgttccatctctgtcccagatatgtgggatcctcatttgtgacatgggaactagggatcttggatcactccaatcactccagatgctacaaggccagtgacttactcagtatgatgctgaggaacatgaccatcagaaacaggatcagagtcactctcaagcaaaaaaaaaaaaaaaaaaaaaaaaaaaaaaaaaaaaaactccaaggattaaatgatttttcccattgtcctggggagaaattaatccaagggaggtcacaggagggcaaataattccccatcaccaccaccaccaccatgagcataccatcacccatggagttttctgatttactctttggcccattaagcgtgaaatttcttatgctaggtttctttctgataagggagaagagattagtatctctacatttcctctcctcctgctacctagtctctgtattctaggttaaattataatttatgttgaggatttacaatggctgatacacctagctgagccttctgcacagagatacattgggagtggaggttaattgggtcaaaggagaaatgccataagcccacactccagcctatcagggtggattaaaggtctgatttgcccaactcttgtcacacctgctcccactgagaggtgacagcatgctggcagtcctcacagccctcactcgctctcggcgcctcctctgcctgggctcccactttggcggcacttgaggagcccttcagcccaccgctgcactgtgggagcccctttcttttctcttcttttctttttttttggatttttttattattattattatactttaagttttagggtacatgcgcacaatgtgcaggttagttacatatgtatacatgtgccatgctggtgcgctgcacccactaactcgtcatctagcattaggtatatctcccaatgctatccctcccccctccccccaccccacaacagtccccagagtgtgatgttccccttcctgtgtccatatgttctcattgtgtagggacatggatgaaattggaaatcatcattctcagtaaactatcgcaagaacaaaaaaccaaacaccgcatattctcacttataggtgtaggagcccctttctaggctggccaaggccagagccggctccctcagcttgcagggaggtatggagggagaggcgcgagtacgaaccggggctgcgcgcggcacttgcgggccagctagagttccaggtgggcgtaggcttggcaggccccgcactcggagcagccggccggccctgccagccccgggcaatgaggggcttagcacccgggccagcggctgctcgggaaggtgtactcggtcccccagcagtgccagcccaccggcgctgcgctcgatttctcgccgggccttagctgccttcccgcggggcagggcccaggacctgcagcccgccatgcctgagcccccggcctccgtaggttcctgtgcagcccgagcctccccgatgagcgccgccccctgctccagggcgcccagtcccatcgaccacccaagggctgaggagtgcgagcgcacggcgcgggactggcaggcagctccacctgcagccccggtgcgggatccactgggtgaagccagctgggcttctgagtctggtggggacgtggagaacctttgtgtctagctcaaggattgtgaacgcaccaatcagcgccctgtcaaaacagaccacttggctctaccaatcagcaggacataggtagggccagataagagaataaaagcaggctgcccgagccagcagtggcaacccgctcaggcccccttccacattgtggaagctttgttctttcactctttgcaataaatcttgctgctgctcactctttaggttcacactgcttttatgagctgtaacactcaccgcgaaagtctgcagcttcactcctgagccagcgagaccacgaacccaccagaaggaagaaactccgaacacatctgaacatcagaaagaacaaactccagacgcgccaccttaagagctgtaacactcaccgcgagggtccgcggcttcattcttgaagtcagtgagaccaagaacccaccaattccggacacaccattgtctgagtaagtttgggtgccaggactatgaggtcgtgtgaagacttccagccccatacctgcagaacagtctgcagctcactctgctctgaactgccccaactttgcacagatattctccattcctcgaaatgaaactgtatccttcaaagctcacacatttcgcttattggctcagcgtagggagcaagttctctagatagcttactaccaaataaaatggtggagaagggaacccaggcagctgggcacaaaaaaggaatgagcaacaagcttcctctctgaacatgattttctgtgtaaggtcttggacactccctcgactgcttccagccatctgcctcatgctaggtttctagttaatgtggaatgaaaactctcacatcttccttctagatgtagctgtggtaattgcaacttaggcagttgtgcttgagaatcttcttcttaataccacatggcaaggtcattccccaatgcttttatttaccttcacttgaatttttatattaaacattggattgaacaagaacggagaagagaatcacaattattgtgtagatgctacattgtagttacattttctcttgtaattattacagtgctgggactattcgagctttaaaatcctttctgaagatcctaaagctactcagtggttctgctggcattaggggttgatatggtttgggtctgtctgtgtcccttcccaaatctcatgttgaattgtaatccccaatgctggatgtggcgcctggtgggaggtgtttggatcatgggggcggatccctcatggcttgatgtggtcttcgtgttagtgagttcttgcaagatatggttatttaaaactgtgtagcacctgaccctctctctcttgctcctgcttttgccaagtgatgtgcccgctcccactttgccttctaacacgagtaaaagctccctgaggcctccccagaaccagatgccactatgcttcctgtacagcctgcagaaccgtgatccagttaaacctcttttgtttacaaattacccagtctcaggtatttcctttttttttttttttttttttggtcttaaactccaagcctcaagcaattctcccaccttggcatcctaaaatgctgggattacaggcatgagccaccatacccagccaggtatttctttatagcaacacaagagtggcctaatacagagggatattgccaatgatttaatagtagtcttcttttctgtatgtcactctgcttgactaaccttaaacagtctctttaaataatttgtaagattcacctaactacacttttcatattgtccttcaatccttgcacttatggcataaacatgttttatgattattatataggtatttaaataatgcatatgggtcctatatttctctatcaatgttataatttttaccagctacataattttgaatcacatgtatataccatcatttaccttccatccatccaaaagatacgagaaggggaaagaaaagaataaaaggtaagtgctaatagataatccgaataggcctatatctattaaatcgattgaaacaataattaataaccttccaaaacagaaagccaagaccccaattggttcactgattaattctactagacttttttttttttgagggggtggcaaaagagctttatttacacactggcacaaggcccgccgggtgtcagctgaagaagtaggtggaacgcttcaccagctccaggtcgaaggcccctggcttgggcaccacctgcagtgtctccttcatctggctggcctccaagatcttctggggctcagagcagaaccgcctgaccaggaacctggacaggtcctgcaggatggactcgctgtgcaagcaaactgctcccggcacacctggttcatgatggagacatcagctgcatgggtccggtaacagtcgtgcacagagacgaaggtcaggcccttcctgtagcagtgcagggtggtgagcatcatgtgtgaggagtccagcgagtggatgaagttgggccggaagccgttcttctgcttaggtgtgttgggcttccggctgatgtctctgttgtgggtgtaagtgatgctctgaattccacctcctgattgcttgaccttggactccaggcgatacggctggatgatggggacgcccaggggggtgacccactccaccacagagcccgtgtgggagacgaggtgggcgctctcgatcagccagtgctggatggcccgggtccccgagaacatctcctgtagactcctgaagacctggcgtacgaggtagtgggaggcctcccacacgaactcctggggaaagtcgttcagctcccggaggcgcttctcaatctgcaggcgcccaccgtagcgggtgaccccgtacaccacggtcatcactgtctgcttcaccaccttgcgggtgatgaaggcttccagcacctgtgccacccgcatgccccgctgggcgtcctgcctacggaacacctccacctgcgcggccacgccgctgtacacgtcctgcggcacatccgagggctccaggttgactgaggcggcgcccacgctgtcgcggcccagggcagcataatgctgtaggccgttgcatctactaaacatttaaggaaggaattataccaattttcttccatgtcttttgaaagacagaagcagaggaaatattgcctaattcattttatgaggccagcattatacctaatggcaaatacagacaaagacatgacaagaaatgaaaagagaaagaagaaaagaagaaagaaacaaaaaaactatacagattaatattgctcacaaacctagatgcaaaatcctcaagaaaatatcaaatcaaatccaacaatgtataaaaataattacatatgttaacaggggtgagatgacatcttatcatggttttgacttgcatttcctagatgattagtgatgttgaccattttttaatgtatgtgtttgccatttgtatctcctcttttgagaaatgtctattcagatagtttgcctattttttaaaaggattattttgaggtggtttttttttttgctattcagttgtttaagttccttatgtattctaattactaatcccttgtcagatggatgatttgcaaatattttttctcattctgtaggttgtctcttcactttgttgatttgtttctttgctgtgcagaagctttttggtttcgtatgaccccgtttgtctatttgcttttgttgcctgtgcttttgaggtcttaccaaaaaaaaaatccttgcccagaccaatgtcctgaggtgtctcccagatgttttcttctactggttcaaagtgtcgtgtcttgcatttaagtctgtaatctattgtgattgttaatattgagtgtcaacttgattggattgaaggatgcaaagtatttttcctgggtgtgtctgtgagggtgttgtcaaaggagattaacatttgagtcagtggactgggaaaggcagacccaccctcaatctgggtgggcacaatctaatcagctgccagtgcagccagaaaaaaagcaggcagaaaaacgtgaagagactagactggcttatcgtcccagcctacatctttctccctcgctggttgctttctgcccttgaacatcaaactccaaattcctcatctttgagacttggactagtttccttgctcctcaccttgcagacagcctactgtgggacctcaccttgagattgtgtgagtcaatattccttaataaacccccctttatatgtacatctatcctactagtctgttgctctaaagaccactgactaatacagattttggcaccaggagtggggttcatacatctatcctattagttctgtccctctagagaaccctgactaatacagattttggtaccagaagtgggattcatacatctatcctactaattctgtccctctagagaaccctaactaatacatctatcttgatttgatttttgaataggatgaaagagaggggtctagtttcttcttctaaatatgaagatccagttttttcagcaccatttattgaagagactgtttttttctaactgaatggtctttgcacttttgtcaaaaattagttggctctaaattcatggatttatttctgggttctctgttctgttccattggtctatgcatctctttttataccagtactatatggttttggctatagcattgtagtataatttgaagttggcagtgtaatatctccatctaagttcttttttctcaggacagctttggctatttggggtcttctgtgataccacacgaattttagaatttttttgtatttttatgaagaatctcattggtattctcataggaattgcattctatctctatattgcttttagtagtagagtcatttttgcaatattatttcttccaatccatgaacatgggaagatgttccatttttgagggaccttttccatttctttcatcagtgttttatagcatttcttgcagagaactttcaactacttggttaaatttattcctaaatattatatatgcacctattgtaaatggcattgctttctttttctttttctgctagctcatcatttgtgtatgggaacactagtgatttttgtatgctgattttgaatcctgctgctttattgaatttgtttaccagttctaagacagttttggtggagcttttagggttttctatgcacatattatgtcatcttcaaacagggaaaatttgacatccttgccctttatttctttctcttgcctgatttctctggccaagacttccagcactatgctgaataaaagtggtgaaggtgggcatacttgttttgttccagttcttagaggaaaagctttcagtgtttccccattttgtatgatggtggctgtggatttttcatgcctatcctttattttgttaggtatacttgttctatatatttattttgttatgtatgcttgttctatacctactttgtttagtgttttttatcatgaagaaatgttgaattttatcaaatgcttttcctgcatttattgagatgattatatggtttttgctattcactctgttgctcttcaataaatatgatgtgatgtcattttttttatttgaatatgtcaaaacatccttgcatccctgggataaatctcaattgatcatagtaaattatctttgtagtgtgctggtggatttgatttcctagtatgtcattgagaattattgcacttctattcatcagcgatattggtctgctgttttcatttcttcttgtgtcccattctggttttggtataagggtaatgctgccttcatagaatgaattaagaagaactctcttttctttgattttttggaacagtttgaaaagaatgggtattaagtattttttttaatgtttggtagaattcagcattgaagccatcaggtcctgggcttttctttgatgagagagtttttattactggttatatttcattacttgtaattagtctgtttagactctctatttctttttggttcaatcttgataggttgtatgtgcctgagaaattatacatttttactaggctttccaatttgttgactcatggttgattgtaatagactccaatgattctttgtatttctgtggtatcaattgtcatgtctcctttttcatgtctgatttcatttatttgagtctttcttttttcttactttgtttagctaaacatttgttaattttgtttatttttttacaaacaaaactctttgttttattgatcttttgtattttatttttactttcaatttcatttatttttgctctgatcttcattagttcatttttcctactaattttgagtttggtttgcttttgtttttcttgttccttgaggtgcatcattagattgtttatttgaaatatttctacttttttcgatgtaggtgtttattgctataaaattccttcttaatactgcttttgctgtatcccatagcttttgatacattgtgtttatactttcatgtgattcaagaaattttaaatgtacttcctaattttttattaatccattggttgttcaagagcatgttgttaattttgatgtatttgtacagttttgaaagttatttctgttattgatttctagctttatttccttgccgtcagaaagtatacttgatgtgatttcagtacttttaaacttgttgagacttgctttgtagcccaatgtgtggtctctccaggagatttttccatgtgctaatgaaaaaaaatgtgtattctgcagctgttgcatgaactattctgtcaatgtctgttaagtctatttggtctaaagtgaaatttaaatacaatgtatctttgttgacttcctgtctagatgatctgtccagtattgagattgggttattgaagtctgcaactattattgtatgggagtctatctctccctttagatctaataataattgttttctgtagctaggtgctccagttttgggtgcatatatatttactattgttatatgctcttgctgaatttatcccttgtctgttttatttttatctgatataaacatagctactcctatttgattttggttcccacttgggtagaatgtctttttccatcccttcactttcagtctatatgttttttgataggtaaagtgagtttcttatgggaagcacatagttgggtcatttaaaaaatccattcagccagtctatatattttaagtgggggatttaatctgtttacattcaaagttattataggtaagaaccttcttctgtcattttattcattgtttgctagttgttttgtatatcttttattcctctcttcctctcttattgtttacgattgtggttttggtagttttctgtagtaataaggtttgattcttttctcttatgtgtatctgctttgccagtggattttatacttttgcatgttgtcatgatggtaatgatcctcttttcacttccagatgcaggactcccttgaacatttcttgtaagacaaaaagctcaatattgtcaggatgtcagttcttcccaactaaatctatagattcagtgaaatcacaatgaaaatatcagaaaggttttgggttttttttttacaatttaaatttttactagagaaagatattattcacatccacaatttcttaaagtcctttataaatgagtgtattccataagaaatacactaaaatcattacttatgtttcatagagggaaaaaactatgagaatactattaacccaaactatatccatattatacttatttcttaagcatttacatgttcaaatacgcttgttggatagtgatcattcatccccacagtggtaaatttcagcataatattaagtgactgagagagactaaagtagtcacatgtagattagataaacagatacttattctgttatacctaagcttacttataaagcaacataaaatgagcattggataacaatgaaaacaaatgtaaacaaacagaattaaatgttactcccttccctgaaaaacaacagataaaagggcttcttgctttattgaatacaaaacatgatctattgtaataaaaaggtaagacattgattttacaaaattatatttccaaatacagataaaaaaatcttgaacagttaattcagattttattgatctaaaatgtgcaaaatatctgataatacttaagtttattaaattcattgtacataggctgatatcatcccatacaaaaaaatgctcagtatcttgttaagattcaaaatagtgtttaattatctgagcttaagatttattgaactactatccaaataacaacaaaagtccatattgtaaaagaaaaaagtaaaactaaaaattttctgattattaattgacttgaaattcattcccattaaaacataaaactatagccaatatccatttgcaaagtgaagaaaaactggaagtccccatgataaatacaccaattccaaataaaaaattaaaatcaaattttgctattacaaaacacacatgatcttttaagttattcaggtttaatagatttactaaggatagagttcatagagcatgtatttggtacttctgtttagactcaggtatttgcaaagtaccccaagagaaggttgagaaggtaaaataaacataaaattgtgatacttctctccacaccacaacaaaggtgcttggatttaaaaattcaatttgtaactctagaagaaaaagagaaacaatttacaactccaaaatattttccagaaaaatgacaaaactggtaactacctagaaatgttattagtgaatcaaagtgcaagtaatgacagcattaacatcaaatgtatttgaagactcaaagttttaaatgttttcaatgacaactagttgatttttctaaggtggtaggtgtgaaataaagataatacaaatctaatttttccaggaactatagcactgcccgtccccatgaaattaaattataatttcactgttcaacataatataaaactgttttgagtaacagtgaaatagaagcatgaatttagatacacaccagccctatatgatggacttattcacacatagtatttttgataacaacctaattagatactgtctttcattgcttactataattctgagaaaccacttttaacagtatacatttacactaccacttaactaaatggggacatataaatatataaatttttaaagaaaaaaattccagttatttagaggagaaataaaacttcaattatttacttttttgaaactgcatttagataaaaaggtatatggtttatgatacttttcacaatgtaataaatttatattccaattttctcataaacgagaggttgtaaagcaaaatatttgttccttgaaaataacctctctcttctaaccctggtaagaacaatgagtgtgcccttaatttcaagactcttgttgtcatccatgtcaattgtctttttcatgaagtataatattttgagagagagagagagttgtaaaaattaaagagaaaacctgcttttggaatgcagcaattctaaatcatttcactaagaagcatcctttgatatgctggtctgaatttttaatataaaacctaagcagtacttatttctgaagtagaactttctccagttttaataacttcatacatagcaagactaaggacatcaacctgtgcttttgagattttggtaggtgttctaataatgtattattttagatatggctcattgtcaaattgggtggacagagatttcatgaattggttacagaaagctaactaaactcttaatgactgaataatggtttgcattttgcttgagccaaaaaagatgtttaagccatgtaccactacattccctgcttaacattcctaagtttctttattcttcatagttttctaatgaacatatattttcctgagtaagattataaaaaagttaacctttcttccaaaagtataaagacaaataaaatgtcgactcacaatacatattttttgcatagcattaaaggtgcggagatattgcctgctcctcttcattatgattggcccacctcttaaaaagactgcaacaggccgggcgcggtggctcacacctgtaatcccagcactttgggaggccgaggcgggcggatcacgaggtcaggagatcgagaccatcctgcgtaacacggtgaaaccccgtctctactgaaaaatacaaaaaattagccgggcgcggtggcaggcgcctgtagtcccagctactcgggaggctgaggcaggagaatggcctgaacccgggaggcagagcttgcagggagccgagatcgcgccactgcactccagcctgggcaacagagactccgtctcaaaaaaaaaaaaaaaatactgcaacagatgattcaattgtctaaaatacttcgaagtacagaaattaaatgctttagcccataaacatatcccttatctactgtgttgctaaggaacatatcagccatatctatcatgcacacttcagcagtctcttggcaaccagtgggaagatggtagacaactttttccagttgggaaagtacatttccatttaaatgttcctgtgacatgcttttccacccattgtcttgctctagattttcaactttcaatgaagtctgactgtgatacttttttgtatacattttcctgtgatgggcatacatcttggacaagcttttgcctactgaagcctctatttttccattcactgtggaagttaatacatgaaagttattattgcactctagtacttctgtgtctgacagttgtcctttggacaaaaacttttctgccaaatttctgtcattcagttttgtagtgattggctgagatgaaccttcctaaagaaacagtaatgaacttgcgtaaaagttaagctgcttctggttttcaaaccactgcagaattttctcagtcttctgaataatggcagcaacagcatcttttattaagcagtacccattatgaaaaaatccgaagactccatcctttatagcttcttttgttaagcttcttccataatgttggtttgtgtctcatagctatgggaatgaacaagataaaccctcatgccaagcaccaagaacccaatctcttccattaatgggtccttgctgacctattgctgaattttctcagatgaggcaaaaaggatcatagcttttttgccctgtctttacatccattatacagggcttattaaatttatgggtcacattttccagttttaggtataaatcgtttggggcagcgggaggtggccagatgccataatattttggcaaatattgtcgtagctctagaagaacaccatcggtacagtcagcagcataaaccatattatagaattccagctctcttgggccccttggaggtggttgtaactgtttcaaaactgtgccatctggatgttgcagtatacccattttgtccttcccatacctgtgcccggccacctgatgcaagatgggcacacagccactgaggaagcggagtctgccgcctgccggctgcagggtgcccttaggggtggcctcgatcgccggtggggtccgcatttctgggggacccggcgcctcgacccggagcggggatggtggctctcttgccataacggagaacagaagcggtagggtcagcaagagcaggaaaagaaaaatagggggagggagggggcgccggagaacccaggggtcgctcaggctcgggcgcgaggaggcccgggggttcccgcggctggtgcccgctgaggtgaggggagggggcccatgacgccgcggcggcgcgggcactccctctgcccaactctcggctgagcgcggctcccggctcaggcccctctgccgccgcagccgcgggcccagtagacacaacccagccgaggagcagcagcagcagcagcggcgccccgcgctccctggggccctccagaaagtttttttatggatatcagcaatctaattctacaatttatatggagagacaaaagactcagaataaccaacacaatattgaaggagtagaacatagttggaggactgacaatatccaagttttaagacttaccgtgaagctacagtaaccaagatgttgcggtattggtaaaagaaaagagaaataggtcaatggaacagaatattaaaagcccaaaaaatagatccaaataaatataggcaacttatatttgataaaggtgcaaaggcaatacgatggtcccaaataaaaaatataatgtatttggagatcagaatcaaggccagagtaaccgagtgtagcaagggaaggagatcagctacagaagagattagagaagtcaacagggtttagcgatgcaacatcccttaggctatgaaaagagatcaatgtttgtagcaggattttattttgagacactgactgaggtttctctcattctcctaccacctcacacagtcaggtaccttcaccatcctcaggaaaaaaaaaaaaatatatatatatatatatgtgtgtgtgtgtgtgtgtgtgtgtgtgtgtgtgtgtatatgtatatatgtgtgtgtgtgtgtgtgtgtgtgtgtatatatatatatatataatatatatatatatatacatatcttatatgcacagccctctaggagaagaggttgttcaaggagcacagatattagaatttttgcctttgagttccaaaacacagcctttaaagtcgtggtagaaataacgatcttgaaagacaacattctttaacagccagactttctgagacaggaaataataatggctccatatatttagcattcattgtgtgccaggcacagctctgagtcccttatattgagacctcaggaaaaccctgatataggtaatgctgttgtctccattatatggttgagggaaccgaggcacagagagaggaattaacttgctcaagtcacgcagcagagccaggacttgagcccaagcagtctggctccagatcctatgcctctgaaagtaagggaagagagtcacagagagaacgcactgggagggggagaaacaggggtgggaagttggtggaaaaaggaactaaaaatttctgagagcctgccagggtggaagctgcacccctttccctttgttctgagctgaggactccagtcttgggaggacattcccaggacagatgaagggatctgcccctatggttgtttctcgctgaatcagagtctcagtcttgctccttaaacccattcttaatcctgttccctctcctgctcaaacacctcccagggctccctactgcccacaggataaagtttttacttgggctctgggagaacccactaagggcctagatgccctgtgctcagccagagaggccgtcagggttttgggttcagagacgtcaccctgcctccacccactcacctccctttcttagatcccaccagtccccaggagccccatgctggctgtcaacgaggctcaagcagaggtgtcagcatagttttgtttctgggactctacagaggtgggtgggtgggtaggacagtcactgtgagttcgcacccaggggctccacccgcagccaaagtccaccctctgcgcgcaatatcagctcgggtttcctgcggggttcagtgtgggtcggcaggatgcggaagtgcagcagggtgagcgccaggaccaccttcatctcagccatggcgaacgcctgcccgatgcagtttctgggggcaaaagtgagggaatctgactgtgcccatgacccccatcccggccccatcatgcttagaacctggcctgggaccccaaacgcacccacataggcttgaggggcagaaagaggggataagtgtccacaggactcccatgtgtgcttgcatatcccccaaacctggcccaggctcctacccccagttcagataaacagatgaaggaggggactctgagcacaccgcagacccctctaggaccttcccaaacccattctgtgaacagttgcccatgaactcctgaggaagggagggaaggagagctggaactgggaccatctgtaacttccccctttttggacccctgcacccatcatgccatctctgcctcagacacaggccatccttacctgggccctgccgagaagggaataaaagccagaggtgacctctccttgatgttctcttggtcgaaacggaaggggtcgtagacctgcaggtgagaccaagaaggcttgctgggtggggtcacccagttgggtggggtctcccagttgtctccaagacccccggccttggagagacattttggcagatgtgtctccattgaggagaggtgatgttggattttcctggtcaaaaccctgtcacctcctctaggaaccttggaatggactccaaaaagggtggggtgagggaggcactacctcagggtctggccacacagttgggttgtaatggatcccgataatattgatgaggcagacaatgcctgtgggagagaagagggcagtcaggacaaggcccccctgcctgagggacccctcttgctacccaggaggctcctccccctgaggctgtgagcacctttggggatgacgcggccgtctgggagcacaaagtcctgcgtgcaacatcgggagatgaccgggactgggggatgcaaccgcaggctctccttaatgcacatggtcaggaagggcagctgggccaggtcgtccctaagaaaacaccccagccccaatcattatcaagggaacaaagacacaattctccagcttctctgtttccaagcgagactttttctccctatcacaaaataaattccacatggatgaaatactggagaatttaaaaagcagaaaaaaattagaaaagcagaaaattagaaaagtaccagaaaaaaatggtgccgattttttaaagattattctgaggaaaacacaacactctgaagccagctattaaaaaggttaacatattggcctaaaggtaaatatcctttatggtaagaaagcaaacacaaaatgcaagtgaataagaaacaaaatacccagatccactgttttgctcttattcatcattgtattagcgatagtagcaaatgcaattagacaagggaataaaaaagagaggaatgcaatttgaaatgtggtggtggcagacggtgattttatacttagaaaaacagaacacttcactggaaaacatttataaacatttaagacccagtaagggagctgaattgtttgcttaatctttcttctttttctgtggctgtttaaaattttaatacattgtacacttaagtggctctaaatttaaaaactataaaacatcctctacccctatggcccaaagtcacctgcttcttctcctcacaggttgcctaagttattattatttttatgtatctttctagagataatttttagtatcttaaaaatatgagtacatcatatactatacacatattccatatcttttctcatttaacagtatgtcagtcttttcttgtgtagctcctgggacttgtatcaaaatagggttatccctactctgaagctataaaataattttcccatggtttcttctagagcttttaacagcctttaaaaaaaactatatacttgagtaatctaaacattgtcctattataagacatggcaaccagattgagttgattttttttccaggaaaataagaagcatctggaaaaagataaaagataagatattaataataatgataataatataaaatatctgaattaaattttaacaagagacgtaaagtctctgtatttccaatgaatttatacatttccctctatctgaataaaagatacatttcaccatagcaacaaaatatctaaggattgatttaacaaaacatgcatatgatatctaggcaaatattttaagctctattaaaagcttaaatattatttgaatacattaataaccattttactatgacaaactatgtgtcaatattatgatgttacctgttttcacacatatcaatcacatattcaagtcaaacaagagaatatattcagtgcaaatgataatctatctaatttttaggaacttgatgaacttactctaaacttttttgggaagaaaaacatcataaagagctaggtcaatctgaaaataaaatattagagaaaagcaagtcggcttaggcaaagaatgcatgactaagacctcaaaagcaaatgcaacaaaaacaaaaataaagaaatcggtcctaattaaactaaaaagcttctgcacaaccaaagaaacaatcagcagagtaaacaggcaacccacatagtggaagaaaatatttgcaaattatgcatctgacaagggactagtatcaagaatctacaaggaactcaaacaaatcagcaagcaaaaaatcaaataaccccatcaaaaagtaggcaaagacatgaataggcatttctcaaaagaaaatgtacaaacggtgaacaaacatatttaaaaatgctcatcactaatcatcagggaaatacaaattaaaaccacagtgagataccccctacttctgcaagaataaccataactaaaaagtcaaaaaacaatagattttggtgtggatatggtgaaaagggaacacttttacattgctgctgcaaatgtaaattagtacaacctctgtggaaagcagtaaggagattccttagagaactaaacgtagatctactattccatccaacaatctcactactaggtatctacccaaaggaaaagaagtcgttatatgaaaaagacacatgcacacgcatgcttatagtagcacaattcacaattgcagggatatggaaccaatctaagtgcccactgacaaatgagtggataaagaaaatgtgacatatatacaccatagaatactactcagccattaaaaggaatgaaataatgtcttttgcaacaacttggatggagctgggaccattattctaagtgaagtaactcaagaataaaaaaccaaatatcatatagtctcacttataagtggaagctatgctatgaggatgcaaaaatatacagagtgatataatggactttggggactcagggagggacgttgggagggaggcaagggataaaaggttacatattgagtacagtgtacactgtttaggagacaggtgcactcatccatgtaaccaaaaaccacctgtaccccacccccaaattactgaaataaaaacagaagagaaagtcattctaccagacattaagacctattactgagttacagtaacaaatgtagcatggcaaagctgcaagaacagaaaaacagaccaaagaatggaatagggagctcagagacagatatgtgaataagtgaaaacccacatctggtaaaggaagccccacaaaaccctgggaaatggatggatagtacagctacaaaagaaaatgtggacaaaattggcttcatataaactaaccaaaagtgtccccaagaagtcaaaaggcaacaaaagacagaaaaaaagatttattttaacacatagtctcataagtaaatatgggaaaataacccaaaggaaaacagcaatgtaagatgatctcttccacaaaaagaaaaaaaatggcaagagatgttctatcccactcttatttaaggaaacgttcactaaaagaagaaatatgcagactgacaaaaatttagtgtggtgagtcctcaaagatctaggggcagaaataccatttgacccagaaatcccattactgggtatagatccaaatgaatataaatcattctgttataaagatatatgcatgcatatgttcattgcagcactattcagaatagtgaagacaaggaatcaacccaaatgcccatcagtgataatccagacaaagaaaatgtggttcatatacaccatggaatactatgcagccataaaaatgaacaagatcatgtcctttgcaggaacatggatggagctggaagccgttattctcagcaaactaatgcaggaacagaaaaccaaacaccacatgtcctcacttacaagtgggagccgaacaagggaaactcatggacacatggtggggaacaacacactctggggcctgtcacagggaggggttggggaggtgagagcatcgggaagaatagctaatggatgctgggcttaataccaaggcgatgggttgataggtgcagcaaaccactatggcacacgtttacctatgtaaccaacctgcatagcctgaaacttaaaataaaagttgaaaaaaataataataataatgtaatactcttggcgaagttatgggaaagctgttgccatcaaactcagctaataggaatagattttttattattattaaaattgtggagtaaaatggccttttattctgcaattgcacttttgggaatttgtcctgcagagatattcacacaaataagcaatggtcactgtacacacatgctgactgcaacaggtttaatttagcaaaagtctgaaacaagctaaatatacattgatggaaagaggtttagataaacatccacacaacagaatgctagtaccatagaatacaatgcaactacaaaaaaggaggaaacaggtcactagctgtgtcacacaatgcaggctggaaggtaaatcagtacagagattctggaaggcaaattggccatatctacaataactggaaagatacacaagtgctttcaacaaaggtgtgaaacaaataaaatatggaatgttatgccatgctaaaaaaaaaaaaaacagctgtaagacacactgtcgagtggcaaaaataagccacaaaatgcatacatgtaaatagcaaagggcaaaatacatagtatatatatatatgaaatacatatttctatgtatatggaaatatacacatttcattgactcctaattattaaattaaataaacatattaataacattataatttaataattaggaatatatatagtatatatggaaatatatatttctatgtatatgaaatatatacatttcattgactcctaattattaaattaaataaatatgttaataaatttaatatatattaaaatatataaatatgtatatatttcattgactcctatttatataaataaaatacatagtatatatatggaaatagatgatatagatagatcgatggatggatagatagatagatagatagacaagaaggatgaatagataggataaaggatggatggacggatggatggatggatggatggatggatggatggatggatgaacggatggacagatgtatagatagatagatagatagatagatagatagatagatagatagatagatagacagatagataagcagacagttagatgacaaattgatgtctcaagagacccctttagggaaagcgaggatattaggtggggtggtgggaatgtcaaggttaaaccctgtcttatctgtagtgtcgcattgagtccaagaagaatctgttctcatcattgcttttggaagtcaacactcattttccatgtataaatgcaaaatagaatggtactcagtctttaaaatgaaaagaatcctgtcgttggtgacaatatggatgattctggaggacattatgctaagtgaaataagccaggcacaagaagacaaatagcaaatgatctcaattacctgtgagagctaaaataggttacatagaaatcacagagacagaagaaaatggtggttgccagaggagggaggaagaaagaacaggaagatgttggtcaaagggtacaagtttccattagacgggaggaaaaagttttgagatctattatatgcatggtgactacagttaataataatagattatgttttccaaaacggctaaaagagaaaatttcaaatgttctcactgctaaaataataagtatatgaggtaatggatatgaccatcaggtggatttaatcattctgcattgtgtacatcataacatcacagtgtaccccataaatatatataatcaaaatttgtcaattaaaaataaagacaaattaaaaaacaaactcattttctaaaactcatattttgagaaaaacagaagatggtaaagatacattgttagtgggcagacctgtgtctattttatgtactcctactcacacagaaaaagagagcatgtgttcatatacagtgggcatcaggatagccattttctaggacacacagaaaaccattgatgatggaaactgccagagtgaggagtgtgaggcttaagaaggaagctcattttttatcaaaatttttggacacttttttaaacaatgtgtaattttgcttgaaatcttggttttaaaagcataaaaatgtttctccaccttacaggaccctgtgctgagcaaaggcttggatgtaagggcactaccttcaaaaggcctgtccagctcaatgtctcctctccatccccagctcctggcctggctcagacctcagaatgtccttccctgggacttccttctacaactggtcctctccagtatgccctctacactagccctaaaaagattctcctgctacctgtctcttcccattgcccttgagttaaaattgaagttcttgacttttttttccatgtattccacacccaggctctgctgccatctccaggttcatcatctcatcatgactcagtttctccctctctattcatctctctgtttctgtcttccctctctctttctttctctcttgctttccttctctctccattctctttttatgaccttctccctccccctgcacacaagccacttctctctttccctcttttctttctcttctctctctctgtttctctcactcttggtctctctctctctctctttctgtctctctctctctctctctctctctctctctctctctctctctctctctccctctctctctcactccctctctcctccctcgacctttgcctaggctctcttcttgacctagagccctactgcatccaaatatctactgatcattattaaggatctcaactgagacacctcacttttattttcatctattcatgtcttttagagaaaaattctcactatgttgtccaggctcatcttgaagtactggcctcaagtgatcctcccacctcagcctcctgagtggctgggattacaggtgccagccactgtggccgggtgagacactttctgtacctccagtcatgcttctcttgttctcagcctcatccctgcccatgtgggctgggagtttcctgtcctgggactgttcccccaccaggctgggagcacctggaaaacagatcgcagggctggattcttccaagctctccagagcaccgaaaggtgctagatacaaaactggggataggaatacagtgtaggagcatttgctgaatgaagactggatggatgaacaatgcaggtgttctggataggaatgaatgacttttaccctcaggtctctcttataaatccctggactgtacaacaggattgaaattagggtaaggaagagcaaacattcagaaagtgaagatgtttgaaaaaacatgataattcagtgaaaagaggaggtggaggagaaattcatttgctgaacacatgctaagtggcatcatctgccttcacatgctgtcacaaattctcccagcagcccaggtcccaaaagcctgcaaaccatcccctgctggcctggctgtgtattaagccctgcctctgagatttgcaccgattcccactaagcgataatggaagaattgaccaaaaaaactccctccctctgcccacctgaggagcagaaccaatgacaaaagatcaggaacaggccagcacctgcactcaccattcaatctctataggttcacggtccttcagaagctcttgcacttcttgccggcactgttcctggtattctgggtgctttgcaaggtggtataggacccaggagagaccactggctgtagtgtcatggcctgaggggcagccaagcaaaactgggtttctgggctgcttcagcaccagagggaggagagcacccaaactctgaggccctcaggagaatgtagggaggaggaggatgggcagaattaagtgatccagggtccacccactacgttcctgggatggagaggcccctgtccccaccgtagtcccacactgagaccctcaccctcaaacatgaaggtgtcagcttctgctcttatgtcctcatcagacaattccttcccatcttcatcctggagagaaggcaagacaatatccctgccccaaatcacaccagctctgaaggctcttgagtcaaacctaagataatttctgaagatccatcctccttccagaaacccaagcccatcatgcactcctagatgtctcttggtcaccaccatcagagcccaccacccacaggcttcccgctggcttcttcacctcctatttggccctgctgggaagagtcaatgacctatggatattttcttgtttcgaataatgaggacttttggagtaaagcattaactggcaacctgggttacagcatatttcaatggcaatttcacttggaggttagaaattaagtattggctgggcgtaatggctcacgcctataatcccaacactttggaaggccgaggcaggtgggtcacctgaggtcgggagttcgcaaccagcctgaccaacatggagaaaccccgtccctactaaaaaaaaaattagcctggcatggtgttgcatgcctgtaatcccagctcttcaggaggctgaggcaggagaatcacttgaacccgggaggcagaggttgcagtgagccaagatcacaccattgcactccagcctaggcaacaagagtgaaactctgtctcaaaaaaaatgaaagaaagaaagaactgaagtattactctgaatgtatttgctcacattctagagtggtaaactcagagaatacttcttatctttccagaaggcatctgggttataaacctataaacctacaggcatgtcgatctcactggaaaggagtagtttttattccagaacaaagcaaacatcctctctctctctctctctctctctctctctctctctctctctttctcattcccactctcgccctggaaggaagaaggggcagatgtgctagctagctatcctatataagccccaagatgtatactgtggggcccctctctgcagtgcattctggtgtatttacaggtaaaaacattgcattaccctagaaggaatatgggaatagagagccagctctacaatcctactctggttgctgctattgctgtgaatgatgaataggctgctgtgatccagggatttggtgcatctgtcatcatagatatagacatagatagatatgcataaaaatatgtcagcctaacttgctaacatgtaagtagagtaaaatctcaggctcctcactatttcaaacttagcagtcccctgccagctgaattccacagagtcatctctcaaacctatctctgacctgtctttttcaagcatgttccatggctcccagtgccctttggatcaagtccaagttctttcatttgacagaggcataaatctccactctattacttgaattcacatcccagagaagcctaccttgctcagcagaagcacatcaatgaagtctaaagtcttggactttgccttgttcttgaggaaatcatcaataccctgagtggggagggtgcagcgccgctcctggatgacggcatctgtgaagtcgtgcaccaggtggcaggccctgcggaagcgctgcccatcaggagtgagataatacaggaagtccgtgtgcaagagaatctgctggtttctcttttctacaaaggcactgagctccaagatggcggcaatatattcactgggcttcctgcatgaaggaggtaacaacttaacatatgcaaagtcccaggagcacctctcaccagcagctagaagctactgcccatcaggaaattgagtatccagaaacagccaggagacttgactctccaaactctcttctctgaggcattccatctctgagagctgcctccatgcaccaaggtacccagagcatagcttggacaccatgcttctctcccgtctctcccacccagtatccagcctgcactcttttccttccaaaaactgttcacaaaactcagacctcactgtcttccagctctttctgacccagcccccaccataacagacttgcattcaatgtctgctccatgtagcgtctacatgacaggcagacctccacagagctcagctgtgaccacatctgtcatcggcccaaccctcttcaaaagattcctgggaacctcctgataaagttcatgccacttttcctgattttcaatgtcctgaaatctatcccctgtctacttccacaacctcatgtctactgtctctttccccctccccatccttcaaagcccagctatgacacacagaaagtgccttcagaaaggcacttctggttaccccggtcagccatccttttccagcctactcccttgggttccaggcccaagttctcaggtcctaggaaaggactcactcctgacaattgctttcaaagctgaagacacatttctgcagactgtccaaggtcatgaggctgatgtgttcaaacatgtccagtctggcgctgccctctgaggccaggcgctgccacttgtcctggccagagaaaaaacagagccaaagctgggaactgcctcctgggagcaccttcccagacccaaacatcaagatggactccctgcaatcatcctcctggtcctctgccccaggtacccatccccaggaaggaccagccttggataggagcagaaactgttactattaggagataaagactcatggctgggagtcgagagatctgggttcaagtcccagttcagcctcctatggtctgtgtgctcttggtcaacctcctgcactcccataggtcccatctatcaaatcttcagtaacagttaggacaacatgctttggggccagataaaccaggacagaatcactgctccaccactcgtagctcacttactatctggttgaactttggcaaactccctaatctctctggacctcagtttcatagtctgcaacagggcaaaaccaaccaaagcctcatggggttattaaaattaaattcctaaatatgtatcatggagttggcaaatggtactgtttctgggatatggtgagtgctcagtaaatgttggttttactcatctccattgctataaattcatttcaaaaatatccctattacttgggaggggaacattacacactgggtcctgtcaggggtttggggacaaggggaaggaaagcataaggacaaatacctagtgcatgtggggcttaaaacctggatgacgggttggtgggtgcagcaaaccaccatggcacatttatacctacgtaacaaacctgcacgttctgcacatgtatcccagaacttaaagcaaatgtgtgtgtgtatatatatatacacacacatatatatatacatatatgtacacacacacacacacacacacacacacaccctgtagttgtttgggccgtttctcagaattgtgtttgcagagaacaacattgagagataaggcaatgactgctcctggacacatatcaggcttgcttctgcttgctaaaaaagcacattcccggccgggtgcagtggctcatgcctgtaattccaacactttgggaggccaaggcaggtggatcgtgaggtcaggagatcgagacaatcctggctaacatggtgaaaccccgtctctactaaaaatacaaaaaattagacgggcatggtgatgggcgcctatagtcccagctactcaggaggctgatgcaggacaatggcgtgaacccgggaggtggagcttgcagtgagcagagatcatgccactgcactccagcctgagtgacagagtgagactccagaaaaaaaaaaaaaagaaagcagattccctaagcctagtgctcctttccttccatgcaccgtactgcataagcaggcaactattcaaacctctctatggcaccccgtgggatttaagtggtttggagaaattatgcaaaccaagaacatgctgcttgctatgccgtgagtaataaattgctgtttgtctctgacccaggactctcgtatctccttgcagaatccatgaagtattaacaaaactagcttatcagcttgcaattaagaaaaacatcctaagcacttcacaaaatcccaactcccaattcttcacttctccctttgcactgtgatttccagcaacttctattaagagatggagactgttttatgaccctttgagtctgtgctaacctaagcctggttgaactttgaaacattgcagagaaaatgtccagagacattgcagtctcctggcagtctctcagaacccagtctgtgccatgtgaacagcagggtgcctccgggaggcagagaaacacatggagaaaagtccaggtgtcacagctgaggccatcccaggtcagcctaaagctagcaaagccccaaacaaacatgtgaataaactgagccaggatcagcaaagctgcccacatgacccacagctgttcatgtaccaagagtgatcccatccacatgcagaagaaccagccaactgtctcacacacttgttaagtataataaacccttattgctctaaaccaatgagttttcaggcggtttgtactcagcaattgctactatgcaatcttgatctttactctcttgagtttgaaggatttctgtgagagaagcatggaaactcacaccttttgagacatactatgtgctggggacatgaatccattaccaccttttaagtagagattgttattcccattttacagatagggaaaccaaggctcagagaggaagagcattgtccccaaagcacaaccaaaattccagagcagatatgcctgtggtccctctaccccaaggctccagctgggacccagagttcaagggactcacgtgcatgatgttcacactcttgttgaaaatcttcatataaggcttcaagatgttgaaatggaaggcaggcgtcaacatccgacggtggcggctccacttgtcaccaccactcagcaggagcccatcccctggcagggcaaccaaggacagtggtcaagggcagcaccctcccttatccctaaaggatatccccaaccccattcacctcaattactcacccagccagggcttcaggaagccatagaaaatcatatccttgggtgcgacagcagctgacatgattgaggaccatcagtggccatggagaggggtgagagaaggactttgggtatggaggaatgctcccagccaggggtgtgcacttccacgcatcccacccagcatagcaggaagaaggccaagggtagaggaagaagggaggatggtggaggaaggagagaccagaccaggctgcagcgacagagtagagcaataacacagcatgccccagcacacagtgacatatctcctacaaggtccaacatgttctgcaacacctgagcatagctcaacactctacagaatgcctttacagggacctaggacactctgtctactcccagcactctctgctatcttctgacatggatctgggacctggaatattgccccgacagttgttaacattccctgacatggccaaaacacatatgacaaaccctaaatgacacaacatgctctgccatggacctgagatggtctgatatgacttctgtgtatcccagtgaagggtcctagataacatttaaatatgatgtcactaatgtcctaaacatggcccgggtataaccaagcctattcttcggcataattcaaatctaccctaagacctaactatactaagactcaaataatatctcagacagttctcaaagattccctgggtcctacaccttggacaagcaccaaacatggccaagacatttgaagtagaataaaaagacaatctcacactacatctcagacaagaaccaaaaagactctgacatgccccaaatgtcctcagccacaactgagccccacacatgatgacttctgtatatgatcccaggtggaagcatataccagatacaatcaaatataatgtagaaaacataggctatatatgggacccttggaagaaaggtgggctttctgattggaactgggcttctgagactcatcgttgacaccatatgaaaaggcaaagtgacacagagaatggtaaaatcgagagaaggagacagattcccagtgatgtggattaattgacacctggatccaaccatgcctgaagaccactctccccagacttacagcacattgattctctttatttgcttagaccacatgagtctgagtttccatcactcgcaactgaaagagacttcagcagccagagagagctgaggacctgcccagagtcactcagcatcctgaggttatagccatagtttctgtgggatgcttcccctgcccctgcttagtctggcctgttcaagcacaggatgagcagaggtaaagaaagggccccagactggggtgggatctcctactggagattgctggggcctggagcaggagagccatgaatagggtggatgagtgacaggatgaggtaaaaggaataaactcaccagacttgaacatcacataaatagcagcccagattctccaccagcctcaaatccccctagtaccataggcttagggacagacaaggctgatgccaggcctggcagcggtacctgtatactaatgatgtccactgcatcacccttccccttgctttaaaatctttttactcatttttccagcaactcctcctccaggaagccttccaatctgcccccaggaaagaccttgttctcccagttgtcacacccatctccttcttgccaattcctgactccacgaagtttgagatgtctctgtccagatccatttcctcaagcacggggctttctcgaggacagggccctaaattgaggctttttggagccccagtggtgcccagaacacaaaggcagagagagatggcagtggagggaggagacgctgacatggggggttcgtgaatacatgaaggaaagaggaacatggctgagagagaagcaggaagaggggcctgggccctgcaggggccacacagaagcttggggaggggagaggctagaaggcctttgatgtttcccagcccccactaccacaagctctgcacgggtacctgaggcactggtgataggccggataatgtcagggtggcataaaatgaggagggggaaggtaggacccagccacaacttaaagccctggggatatgtggtcaccagctgggtcaatgtcttcatgccctcttccgtgggagtgacctgaaaacaaggcagaggccgtcagcccttgtgatggttaattctaggcatcctgaattaatcatgaattccacgtgaccgagccaagagatgcccagataaaacatgctggtaaaacattatttctggatgtgtccatcggtgtatttccagaagagattcacatttgaataggtaaactgaggaaggatgatccacctccccagtgggggtgggtgtcatccaatcctttgatggtgcagatacaacaaagaggcagaggaaagggtggatgtgctcatccatctgctcctgtccttggacatgagaactccaggttctcaggccttttgggactcagactgaatttacaactccagtgtccctggtttctggcttgcagatgctatatcatgggacttcttgtcctccatcatcacattttccaatttccgtaataaactctctctctcacgctctctctctctctctctgtctcatacatgcatgagatataagcgggaagatatcctgtcaattcagtttctaaagagaaccctgagtaatgcacctccccaccaggagccacatcaagttccccctgcagcctccagatgtggtgcagcctctgccctgagcatcgtgtctggattctgaacagctgcagagaatctcagctgacccctgctccttctctcttggggctgtctccaagatccaaagataatggccgggcgtggtggctcatgcctgtaatcccagcactttgggaggccatggtgggtggatcacctgaggtcaggtgttcgggaccagcctgaccaacacagcgaaatccccgtgtctactaaaaatacaaaaattagccaggcatggtggctcacacctgtagtcccaggtactcaggaggctgaggcaggagaatcacttgaacctgggaggcggaggttgcagtgagctgagatcgcaccactgcactctagcctgggcaacagagtgagactctgtctcaaaaataaataaataaataaaagatccaagagtaaataccaaagcagagggagaaggcaagctgtctgctcaagaggatgtgttttctcgtcttggaaatggtttcaacctggggatggccacatggaaaagtccgcatggaaggaggtctgtggacagcagtgtggcctcaggacatgtccctgaggctggttcctacatccctttcacgtcctggctggtccccaccagcggctgttcctcccacactggggacattccattctcagcagcccccaggcgtagaggagtgactcttaactgtctacagtaagcacctcctgcaggccaggctctgtgctagtgtgtcctattcaccctccactgcaccgatggacacgcccatcaattttgccatttacaagtgagcagaccaaggccatgtcccccaaatgggagagcaggtctaagtcggaggccaaggtctgcggagtcaaggacagcttctgaaaagagaagggagtggccaacttttattcaggcaggtaacaaggccgactgggacatgttagtgaggaagagcaagataggaggaaggtgcctccagaaaaggaggcagcgggagactgcccacacttctcttctggaccctctgtgtccctgcgtatggaaaggggctcagagctaattcctgtgagaaagcagcagcacagagatgggcagacacaagcaaatgggccaggcagggagtagtccctggacagtagactcaggaggcctcaagtccagcagtggagaaggtgcaaatgccaggagatctttgctctgtgcacccataccactcccacaggagaccctcagaggtgcagtaacacagggaagacaggcaggaaaaagatccaagcaggctggagtgggaggacagggaggtgagaaagacttgggatggcacatcagaggaatgagtgagcggggagaggaatgagtgagcgaggagaggaatgagtgagcgaggagaggaatgagtgagtgaggagaggaatgagtgagcgaggagaggaatgagtgagcgaggagaggaatgagtgagcgaggagaggaatgagtgagcgaggagaggaatgagtgagcgaggagaggaatgagtgagcgaggagaggaatgagtgagtgaggagaggaatgagtgagtgaggagaggaatgagtgagtgaggagaggaatgagtgagtgaggagaggaatgagtgagtgaggagaggaatgagtgagtgaggagaggaatgagtgagtgaggagaggaatgagtgagtgaggagaggaatgagtgagtgaggagaggaatgagtgagtgaggagaggaatgagtgagtgaggagaggaatgagtgagtgaggagaggaatgagtgagtgaggagaggaatgagtgagtgaggagaggaatgagtgagtgaggagaagaatgagtgagtgaggagaggaatgagtgagtgaggagaagaatgagtgagtgaggagaggaatgagtgagtgaggagaagaatgagtgagtgaggagaggaatgagtgagtgaggagaagaatgagtgagtgaggagaggaatgagtgagtgaggagaggaatgagtgagcgaggagaggaatgagtgagcgaggagaggaatgagtgagcggggagaggaatgagtgagtggggagaggaatgagtgagtgaggagaggaatgagtgagcgaggagaggaatgagtgagcgaggagaggaatgagtgagcgaggagaggaatgagtgagcggggagaggaatgagtgagcggggagaggaatgagtgagtgaggagaggaatgagtgagcgaggagaggaatgagtgagcggggagaggaatgagtgagcggggagaggaatgagtgagtgaggagaggaatgagtgagtgaggagaggaatgagtgagtgaggagaagaatgagtgagtgaggagaagaatgagtgagtgaggagaggaatgagtgagtgaggagaggaatgagtgagtgaggagaggaatgagtgagtgaggagaggaatgagtgagtgaggagaggaatgagtgagtgaggagaggaatgagtgagtgaggagaggaatgagtgagtgaggagaggaatgagtgagtgaggagaggaatgagtgagtgaggagaggaatgagtgagtgaggagaggaatgagtgagtgaggagaggaatgagtgagtgaggagaggaatgagtgagtgaggagaggaatgagtgagtgaggagaggaatgagtgagtgaggagaggaatgagtgagtgaggagaggaatgagtgagtgaggagaggaatgagtgagtgaggagaggaatgagtgagtgaggagaagaatgagtgagtgaggagaggaatgagtgagtgaggagaggaatgagtgagtgaggagaggaatgagtgagtgaggagaggaatgagtgagtgaggagaggaatgagtgagtgaggagaggaatgagtgagtgaggagaagaatgagtgagtgaggagaggaatgagtgagcgaggagaggaatgagtgagcggggagaggaatgagtgagtggggagaggaatgagtgagtgaggagaggaatgagtgagtgaggagaggaatgagtgagtgaggagaggaatgagtgagcggggagaggaatgagtgagcgaggagaggaatgagtgagtgaggagaggaatgagtgagtgaggagaggaatgagtgagtgaggagaagaatgagtgagtgaggagaagaatgagtgagtgaggagaggaatgagtgagtgaggagaggaatgagtgagtgaggagaggaatgagtgagtgaggagaagaatgagtgagtgaggagaggaatgagtgagtgaggagaagaatgagtgagtgaggagaggaatgagtgagtgaggagaagaatgagtgagtgaggagaggaatgagtgagtgaggagaagaatgagtgagtgaggagaggaatgagtgagtgaggagaagaatgagtgagtgaggagaagaatgagtgagtgaggagaggaatgagtgagtgaggagaagaatgagtgagtgaggagaggaatgagtgagtgaggagaagaatgagtgagtgaggagaagaatgagtgagtgaggagaggaatgagtgagtgaggagaagaatgagtgagtgaggagaggaatgagtgagtgagcagaggaatgagtgagtgaggagaagaatgagtgagtgaggagaagaatgagtgagtgaggagaggaatgagtgagtgagcagaggaatgagtgagcgagaagaggaatgagtgagtgggcagaggaatgagtgagcggggagaggaatgagtgagcggggagaggaatgagtgagcggggagaggaatgagtgagcggggagaggaatgagtgagtgggcagaggaatgagtgagtgggcagaggaatgagtgagcggggagaggaatgagtgagtgggcagaggaatgagtgagctgcctccctctcttctctgtgttcccacaccccagccaccctcaaaacccagctccctgagccccattcctgcccctcaggaactccatgcatcctgagaccccagacccgtcctgctgacaaactcaccaggccctggtgtccccaaaaccagttctgtttcgggggttgaggaaaacactggaggcggcggcagttgtcatagaaggtgtaggtccaggccaggacgcgggccaggagccaggagcctccaaccagcagcagaagcagccacggggatgctgccacgggcccgaggcccagccaggacaggctcagctgcggcatcctgcagggcagacgggatggagggtgggatcctgaggcccagggaagggcccaggaagctccaaggacagtggaaaggggcaaggatgggcagtgctggaggcagatcagggaaggctctgagatgggtaaacaagagctgagatctaaagtccagaaatgcccaatgaaaaccagcagccaagtggcctccagttacacagaaagggaaagagagagagaggctgattagaatccaaaaaggcccagcctgaatcactgggaggttgccaggggtccagttaccaggaaatcaccagtctcccaggccagcagccttgacccaccccaaccttgggcagtcccctccccatcccaggccaggaccctccagccctgccactgccagcctggctcctatcagaagcagcttgtcccacataccctcctctccccctctgctaggaggtctttgcctctggcccctgatttccggaaggctgtgggaggcgaggctgggctgggctggtcgagccaatccccatggactgggtgtgtcttccaagcctgggcaaccaaccaaaacctggcgtagggccagctgggtgcagaggagccagctcagggtgacacagcatgggcacaggatccgcaggtctcaacatctcacacctgagtgggaggggatcttgaggaagagtcaaaggtgactctgagccccaaagtttacagccaccttgcccttccaaggcaagagtgtggcagataaagtcatgaacttgagagttcaggtggcaagagagtggggccaggccaaccattgtgccagatcatgttctgagctcctctccacatgtggtccaggagttcatcatgcaccatttctcagtgcagacttaggagattcagagacagaagctcctggcctctggcttcacagtctggcaggagttcaagtcctgcctccaggcaacccagggcctgggtcgagacatgactgacaggagtaggaacaaactatctaactgtgctggggattacccggtcagattttagagataaagagccccgctggaggagaatacctggaggctaggttcagcataggaggacagagaggggagatgggaggtaaggctgagaggggccatgagtggatggggccagggacaggagggcagagatgggggaccctgagtggagtccttattctgccctccccttgccctaactgtgggtagtgagcccctcctggactcaggcttcccatctgggaaatgggatgtcagataaggccttagagggggacagaggagggatcacaggaaaatgggccttagatggggacagatgaaagattctgaggagggagtgaagggaaggggctggcagctagcactttagctgctgtgtgtcagtctctgctctttgcaaaagacaatatgcaaagttcttttactgtgtactggactctaaataaagcacacctaccatgtgccaggtactctgtatacatgttgtgtactgtgtgccaagtgctctatgaaaagtgtgtccactgtgtgctgggcgctctacagaaaatcttgcttctttgttctcggtcctctatataaagtgaaatttgtgcggagtaacttatgtaaagtgtacctactctgcacctgctgctctatataaaacacacctactgtgtgtcagatgttctatgtagagcatgtttactacgtgcctggtgatctatgtcaagtgcacctactgtgtgtcaagtgctctacataaagcgtgcctactctgggtgctgggtactcttcataaactgtgactccatgtgtccggtactctacataaagcacacctactgtatgccagatgctctacataaagtgttctttctgtgtgtcaagtgctctacataaagcgtgcctactctggatgctgggtactcttcataaactctgactctgtgtggccggtactctacataatgcacacctactgtgtgccagatgctctatataaagtgttttttctgtgtgtcaagtgctccacataaagtaaaactactctatgtaaagttcttgacataaagaatgcctactgtgtgcaaggcactctccacaaagcactcctactatgtggcaggggctctaggtaaagcatgcctactgtgttccacctactctaggtcaagtgcacctgctcatgtcagatgctcacccgcgtcaccatgcccaaagccttcacaccaacctcccctcggttctctgagccagagccctgggattgttggagagacctgagtgatggcatccagagaagggaatgcatccatttaacaaaagagcaaactgagtctcagagagggcaggcctctagcccaagttacagagctcacaggaagccaggtttgtgagatcctcaagcccaaacctttttcctctgccatgctgttctgcacccattcattagggtcaatgccatattaatacagggacatgtataaatggaggaatctcaggcaatgtcatggtcccagaggggaaatatcttgaggtctttgaatcagcacctggctcctcctcccacaccccggatgctccacccagcagacccagggctcccctcctggccctccttgtatcctgtccagaattgccctgccgggtggacttgggtgagggggtgcttgaaggatggggctcctagcacagctgctaagcaggagggcagggaagacagtgctcctgacactggctgggtgttggggagccccaaagcctcccccaccccaccaccactgccagctcaatcaaccaggggattcaggctcctggccctacagcctcagtggggtagggtgcatcccccaaaatccctactccctctgcaaggacagacctcacctactggcagttccatccctgttaggctcagggagcaaagccagagtttgatgaacaggcggggttatagggacacagaagaaagcgctcccagtggctagaggggtttggcacactgtagaccacctgtgtgcctgggatgagcaggcagcctagagcaggaatggtggccaccaccatttgccgacataacctacacagcctgttttaagtcctttaagtatattagtcaccttgtttttcattttacaaatgaaacattaagcctggaagatacttaagtgaccacccacagttgcacagctggtggagccgggctatacacccagacctcccacccagcctcacattgtgctaccctcaccaccgggccgtgctccttcacgtctgtaaatgggcgtttcagcagcacccacctcacatggttgtcataatacttaaaaagacaatgcatgcaaaatgcacaaggcagactaaaggttcagcaagtgcaactcactgttcctgctgttgttgcagttgctgtgtaagctgcatatggggtttgacctggatcccacagggggcagagacatggccttgcactgtattagagaagggacctaaaggtccagcctgtcctcaccacgtgttctctttggctgtagattatggctaggggagcaacctcctagacacaggaggcttggcctgaatccagaagagttatctgtggtgaagtagtaacagaaaatttgaacacctgttaggtgttaaggcagactcacaggtggattcttgcaggggagatgccagctgttctggttctgggaactgaacaatccgtggagcccagcctcccatctagtgaagaagtgagctctacacagcccagctactgcatccatgagagtctctgcttgaatgtcccccaacatggagacctcagcacacacacacacacacacacacacacacacacacactctgcctttacagcagtggtccccaacccttttggcaccagggaccagtttcgtggaagacaatttttccacaagttgcagcagggggaggagaggcaaagatggtttcaggatgattcaggtgcatcacatttattgtgcactttatttctattattattacattgtaatatattatgaggtaattatacaactcaccgtcatgtagaatcagggagccctgtgcttgttttcctgcaactagatgatcccatgtggcggtgatgggagacagtgacagatcatcaggcattagattttcataaggtgcacacaatctagattccctgcatgtgcatttcacagtagggtttgcactcctttgagaatctaatgctgctactgatctgactgagcattactgagctcaggcagtaatgcgagtgatgtagagcgactctaaataccgaagaagttttgctcatttgcccaccgctcaccttctgctgtgtggtacagtccctaacaggccacagaccagtaccagtctgctgcctggaggttgggggtccctgctttacagaatattagagggtagatactctacggaaatgagcctcaaactcaaccagttctaaatcaatgagaaaggggatcatttaaaatgcatcttcctctatgtacacacatgtcaagggaggcaagatatgaggctaagggattgaggtacagaacagcaggtatgtctgcaagattttcacagaaattaggtgaacagtgcacacatgcatacacttctatctgtcatatttgtataaataaactctagcatgaataatttttaagcttagagtatagaagtttatgggccgagcacggtggctcatgcctgtaatcccagcactgtgagaggccgaggtgggtggatcacctgaggtcaggagtttgagaacagcctggccaacgtgatgaaaccctgtctctactaaaaatacaaaaattactaaaaatacaaaaagtatctaggcatggtggtgggcatctgcaatcccagctactcaggaggctgaggcaggagtaccacttgaaccctcttgaacatggaaacccaaaagaaatcttaaaaactgagttcccagctatgatgggaggggatgtcggctatgcctcagtatgtcccttccttattaatctttaaccagaattatctccagtcctatctcctttgagactggaatcttcccatcctttgcaggagctaaagcctccctgggcagagagcccttgtgtgctggaggaagaggtggaggctgcaggttcctgaacgccccctgaggctcctcctggcccctccagacccagaggacagcccttccagggtggtttcctggggaggcccatgggaatgacctgctgggaaggccactgcaggaataaagctcacagcaccagtttaaggaggcctttgtctggctcctacacttgcctacaggtaccccctgaaaacaccttaaaaggctgctttttctgcatttgccttatggccacttgattgaaggcagccccaggtggaggggaaccaagaggatatgggtacaagggcagagtcagagagttgtggatggagctgcccagccggcggttggggtgcagaactgaggagacagggaagagagagatctcaggcttaggtggctgcctggggtctgtttttcccacacagagcacctggctgttcagccagcccaggtacccattgcagcttataggtcaacggtcctcaagtgaatgtgattgtggcccccaggagacatgtggtcatgtccagagatactctggttgtcaggacttgtggggagggggtgattttcctactagcatttgagggattgaggtaaaggatgccgctaaatgtcagacaattcacaggacagctcccactatgaagaatgatccggtcccaaatgtcacgagtgctgagattgagaaaccctgttctaggtatattttgtctccactgttgtgtccttgctaacctggttgcaagaggtaggatggagctggatgcattccagtgctgtgagatgtttgctctgcacctgtgtgtgagccatccgcagtgataccagagtaggcagaattctgtccacctgtcagaggagatgggggactgcagcctcgagagctgtggctgctccagcaagcaggaggcaggatggtggaatgtaggggtgaagcaggagcttgaggagagggggaaggttggatcagactcttggttggatcagacactgtgttgtgtcattgccaggaatactaaggtccctgctagggttggagaccatgcatctagaatggggtcagtgagtgacatctggtacagaatgatacaaacaaaccagctcagaagaccaaaatcatcatcagtcaatgacaatgacttttacgaggtggactctcacagtgctctggttactcctgtttttcacttggggagaggagcctcagagctgcaaagtcctttctccaaagacacacagtgagagctggggtttccaccctgggtctgatgcctccacaacttgtaaacatttcagaaaattctctctggaagccagagtggagtgtgtgcagaggagaggagataaggaggaggatggggcagcagtccaggagagaggatggagaggagtggagcagatgaagtgcttaatagaagagaggttgcccagcaatgggagggatgggggaggaaggtggctgacgctggagtatggtttctgggtagggaggctgcatggtctgaagactttccttccatgtcataagcgtggtcttttcatgtgggatacgttgtccagtaaagttcctcattgtccaggtgattctgtgttctccaagcgccgggctgactcctcctgcatggtgggggttgggagggcagatacttgaggacaatgtcctattgagactactatggggtgtaataatggatgggtccatcgagaaccaaggatttcagaaactcttgtagcaatatggctcacattattcataaaaatatttttgttttcttttatggtagaattcaggtgcagaggattcagactgtgatatttcctgtttgaggcttttgattgacattggtttgtgcaagatccttttcttatttcatttgtttatcccctttctttcactgtttccattcttttctgacaggagttttcacatacttaatatgcactttttgatttgtatatgcttttgtaagatacacattgcattctatctgcacatattttttatgtgactattttaaaatggtaaattaatgggcttaattttattagagaagttttaagtttatagaaatattgatcagaaagtatagagagttctcacatacgcctcacccctgcatgtggggcctcacccctgcatgtggggtcatctctcctattcctgacatcttgcatttctgtagcacctgtgctacaatcgatgaaccaatatggacacattattaaccaagttctagagtcgtctttccttttgttgacatcttgcattcctgtggtatgcatgttccaactgatgaaccaatattgatgaattattgttaattaaattccatagtttatattaggttatactcttcgcattgtgtatatggattttgacaaatgacatggattcattattactgtatcattcagagtagtttcatgtacatatattttaatgtgaccacatggaattatgctagagagttcatcctgttttttgtttttttcactcaatattattttaaaggttgacttatattactatgtgtgcatctaactcctgccaaaagctctatatcctttttcctctatatccgttgtttgcctctatataattttacctgccttctctccaattaggaacaagcaggcttatccaacacctccactaaaataactgctgcagggaacattctcttacatgaccccctataaacaggtttcagaagtcaagatagatacacagtagcaaggttgctggtacacagagcatgaatcccattaaaaattttaatttctaccattctacctgcccactaatagtgcaaaagtatttcttttattattattatttgagacagagtctccctctgtcaccagcgggctggagtgctgtggtgtgacctctacttactgcagcctccacctcctgggttcaagaatttctcgtgcctcagcctcggagtagctgggattactggcacgcaccaccacacctggctaatttttgtatttttagtagaaacacggttttgccatgttggcgaggctggtctcaaactcctggcctcaagtgatccttctgcctcggcctcccaaagtgctgggattataggcgtgagccaccatgcccagcctagagtgtgtaagtatttctttctcctcatagaccaatcaaccctggacattttataattttgggaattgcaggggtatacagtgaaattccactactgttttttattttccccttccctccattctttccttcctttcttcttttcttcctttttgtttttctttttctttctttttttttagcattctttcatttgcctgagtaactcctatgcatcatcttctcacatcttttgctcatttttgcgttaaggtacctccttcttcttgatataaccggtttcttgtttgttctatgttattcccttgtcagtttttaagaaattccccacactacttggatgtgttcctgtcggttttagacaatgcaaatatcttttccccatttcccatctgcctgttaacttcatcctggaaaccctttgttgaatggaaatccttaatgctgatttttttcatgttttaaaaatcatcttaatgtttgtgcttttgaaattttgtttaggaagtctttcctcaagcctagctcacaaagttattctcctatactttcttctactaaatttatactttgacatttggtatttattttttgaatccagctggattcctcctttgtatgtgctgttaggcagaaaatcagatttactttgcttcataaaatgagcagttttttcactacaatgagtaaacaatctaccttttcctcttgacttgtgccagtacatttatcatgtactatattaggttttgaataatgcagggatattttttgagatttccaatcaacttattcagatctatgtctgttccatctttcataattttaaaaatgactatgacgctattgtgtgtctcagcatgtgggagagaacagctcttctcttgtttccatttttataatattagtatggttcgtgctaacatttatgtatgtatgtatttgagacagagtcttagtctgtcacccaggctggagtgcagtggtgccgtctccactgattgcaacctccacctcttggtttcaagtgattctcctgccttagcctcctgagtagctgggattacaggtgcccaacaccacgcctggctaatttttgtattttcggtagagacagggttttgtcttgttggccaggctggtctcaaactcttggcctcctcaacctcccaaagtgctggaattacaggtgtaagccaccacactggcctgacatttatttttctgaaggaattttcaaatagtttcattaaatgtatggttgattcactggaactgtaaacacaattgtattgaggttataatttgagtatgaattgacatcattcatacatcaagccataccacccaagactgtaaactgctccccgtatgttcagataatcttctacatgtttattagtatggatttaaaatttttctctttgaaggtatgggatgctttgggttaattcctagatatttcatagtagaatttttcaaagtatgatatgaggacctctgcagggtgatccctgaagtctttattttttctaattatatattagaatatattttcatcatatgcctcaactaagacatcatacaggctcccaccaccacacccggctaattttttgtattttttttttagtagagacgaggtttcaccatgttatccaggatggtcttgatctcctgacctcgtgatctgcccacctcagcctaggattacaggtgtgagccaccgcgcctggcacatattgccacagactgaataaagaaagaaatgtgagcatcaagctgtttcctgccaagccaggacatacgatgtttttgctaaaacgtcaaacaaggctactcttctcacggaatgttttttcttaatgtggttatttgcctgaaaatgttacttatatttgtaagagttaaagaaagaagaaagaaacacgaaacatggcttggcagttaaagacaggtttactttagataaaacctgaggggggcttctggccaatttcagtcaggagaagtttctcttacacactaagagtacatattagttttagggtgaggggcttatcacaagcttggaatgtttctgtgtgggggagaagttttatggcagggttggaatgtctctgggaggaggggaggttatcttggggctgacatctttccggccgggtgggagtgatcttgaggctggcatcttcccagccagaggaggcaaatttcggggccagcatgtctctcactggggaggagtttggaatatttctggctggagatgttatttatggtttatggttgtgctgaccttagccattagcctgacaccctttggatttaggcggttttttattaaggggaattttagaatgaggggcttgtccaagatagtgatgctcctgctctgtcaatattagcatgcaataggttcattattgctcttttaaatgtactaataactaatattttaaatgattttcaattttcatttccaatatggtaaaaaacaatgatagttctaagccacaataaacaaaagccctttagagtgctcagtaatttgggtgtgtaaaggaatcctgagacatgtttctttatatttttctttatattttgtgcatttgaaattttgcttaggaagtctttcctcgtgcctagattacaaagttattatcctacactttctcctattaaatgtaaagataatggcaaagagtgcaactacttttgcaccaacctaatagtttgtgttgctgttgggaatcttccccttctctgtattcaacttctatttcttgaatgcttgttactggtgtgacactaggaggatcactgggatttttgccagctgaccttgccttctgcatcactgggctctgttattgttccaatagattataccatcattcttttatcttttatatgtagatgatcacgtctcttcgcttccagtcctcagataccttagatactttgtttctttttcttgccttgtaacatcactcacgactttcagctccatgttaaagaacagcagagttagtgagtatccttggctttttcttgatcctaaaataatgcatcaaaaagtttcttcatttagtgtatgtagtatttgctaattttgtgctatatattctatatttagataagaaaatctccttgaattttgtgttgtgaagtgttctttaaaaatcataaataggagtagagtttaagaaaaacatatttatgcctttattgaaataatcatgatttttcttttttaatcaactcctgtgataaatcatatgataggttttctgatgttagccatccttgtcatttgtgaaataaatctataccactttattatggtaaaccatttttaatataccattaaatttgactaggttatggttttattctggaatttaaaatctgcatggataggtgaagtaggcctatagttgtctctttttcttttttttttctttctttttattttttgagacagaattttgctcttgttgcccaggctggagtgcaatggtgcaatctcagctcaccacaacctccacctcccgggttgaagtgattctcctgcttcagcctcccaagtagctaggattacaggcatgcaccaccacacctggctaattttgtattgttagtacagatggggtttctccatgtttttcaggctggtcacgaactcccgtgatccacccgcctcagcctcccaaagtgctgggattacaggcgtgagccaccacccctggccaatttgtctcttttttcagcaaatattcttacctgattttagactgagattgcattaacctgctgagatgtgctggtcagatttcctaacacttttctatgtttttgaagctcatgtataagatactaactgtttcttaacataataataattgctaaactttaataaaacccactggggcaaagattttagagaaagaccatctttgactaccatttcaatttatttaaagcttatttgagcatacaaggtccccatttttcttgaaccagttttagaattttatatttttctgagtatttggtcatttcatctacaaagtaaatttattattttttaaaacttattaatttaaacatatccattttctctgtaattatttaccatttttaatttggagttttgttattggcaccttctccttgtttccctctatcttctcaatcttttctcatgcgtgattttggctttattaagcatgaacttttcttgaggcagtttcttgataaatctatttagtgccatgtatttccctcaaagtactattttaggttaaaatgttgacattcaatatttgaataatcatttaattctaaagctttcttaatttttataatttactgttgaacctgaagattattcaattatatagttagcttccaagcatatgagatttgaaaagctatttcttctctattaatttttaatgttaatgcattatcatttaaataacatttatactttggaattaaagaattttttatatcttaatgaaatgtcagtttttgtaaaagtatccatgtgcttgaaaaaatatttattctctggtgaagagtctaatatataatagctaatatttattaattgcattgtaattattaattgcattgcaattaataattaataaattacatttctgaactctgttaaactttctaactataatatctatctgtcattgatttagttattattccaggattattatccttaatattccaggatatatagtaatgtagacattatatttatgctgattgctataatgttcttttaaatggtatgaatattattctctatcctttagcgtgtgtgatttcaaaattttagcatgcatcaagaaacaacatttttcttcacagccgaaataaccagattgcacttttaaaaaataattagttgggcatggtggctcatgcctgtaatcccagcactttgggaggatgacataggaagatcacttgaggccaggagttagagactagtttgggcaagaatgtgaggcccagtctctatggaaaaaatttttttttaattagacaggtgaggtggcacacaactgtagtcccagctatttaggaggctgaggcagaggattgcttgagcccaggagttccgggatgcagtgaatcacgatcctactctaacctgggggacagagcaagacctgtctctaaataattagtaattagatcaataataatgctttaatattactcatacctaatcattcattcatactataatcaaaatgttctccattgccttaaaaatacttacagctggttatggaaatgaagattcaactggtcccctatgttgcatccagttgctatgtccccgaatctctcttatcttttggatgagcctttatcaatgagaccagaccaattgttctgtggaattatccaccttctgaatttttctgaaagcttcctcacattgtcatttagcttattcctccatcttctgtacaatgattattctttttgactagtgggcatcttttcaatctagtacttgcagtcttttaatattatcccattacttagtgaaggtttcatttcacactggtacaagatatccaaggctttcttccatgtccagatcacagatttgccatgtctcaaggaactctggttccctgcagtggcatatggtattaaagacattgtgatcactgtttccttagattccaccttttattattattaagattgcaacctcagcttttatttggtgcatatttgtctgacatgtatgtatccagccatttcttttcaaattttctgttcaatttttttagaatagtaaatgcaccatttgaaattagatggcataaatgagtaccaataaaacagtattaaaataaatgtaaatgggttaaataagcaactaaaagacaaagactcccagggaaaaaagatttaaaccccaagatcaaaatacatgttttctagaactggcacattatcaagagaacctgaccctgatcatctatgctggtctctaatggctccaagtattgaaccttttctttatgttagtcagtgttaatagaaacccaattagtagccaaaatctgacttgatcatctaatatagtgatctcatttgatctttgtcacattgctgaatgttaagaactattattatttattccattttacagatgaggaaagtgagacccagaaaattctgctggttgttgaatagcatagagctgttgagttgccatttggtctgtgatagagtctatgttttaaccactgtcacttaattttgtttctgatctcaccagatacagtatccatgcctagtcagaactatagcatcatatctgaatttaacctctttggcttctcagccttcccccagcacctcctgcccatcttgttcctgctgtacctcctgatgttcctgttcacattgctgggcaaccttctcatcatggccacaatctggattgaacacagactccacacacccatgtacctcttcttgtgcaccctctccgtctctgagattctgttcactgttgccatcacccctcgcatgctggctgatctgctttccacccatcattccatcacctttgtggcttgtgccaaccagatgttcttctccttcatgtttggcttcactcactccttccttctcctggtcatgggctatgatcgctatgtggccatctgccacccactgcgttacaatgtgctcatgagcccccgtgactgtgcccatcttgtggcctgtacctgggctggtggctcagtcatggggatgatggtgacaacgatagttttccacctcactttctgtgggtctaatgtgatccaccattttttctgtcatgtgctttccctcttgaagttggcctgtgaaaacaagacatcatctgtcatcatgggtgtgatgctggtgtgtgtcacagccctgataggctgtttattcctcatcatcctctcctatgtcttcattgtggctgccatcttgaggattccctctgccgaaggccggcacaagacattttctacgtgtgtatcccacctcactgtggtggtcacgcactatagttttgcctcctttatctacctcaagcccaagggcctccattctatgtacagtgacgccttgatggccaccacctatactgtcttcacccccttccttagcccaatcattttcagcctaaggaacaaggagctgaagaatgccataaataaaaacttttacagaaaattctgtcctccaagttcctgagcgccagtttggtggtgatgaaatataataatgtgtatctccatagggctgttgtaagtgttcaggtatgtgaaaatatgtgtttgatacatactagctattgttttcccttccctttttgcttaagctcaagtgatcataatcttttctttatgagccattatgatgacctttatcccattatctgtgcctagaaatgtgttttctgtccacggacaggtggggatcatcacgtggatgtgtctgggcacttatgaacacagttcttcttgaatggacaggcaaaaaagattttattttcccctagtgtaagaaaaagcaagaataacatgatagtcataaatgccacccagcactgagctttttctatgtattggcactgtgtccagtgttttataaatattatccttttaattagaagaaatgtacaaaggaaaataaactatttgcctcagataaactggtttcttatttaaagttcctcactgtctttgggagagatataccctaagtttgtgtgtggatattaatatgttgagttgaatgaaagatgttagaatgcaaacgttgagagagggcaagaaggagatatatatatatatacacatacatatatacacacacacatatatatatacatatatatgtatacatatatatatacatacatatgtatacatatatacatatatatatatacatacatatgtatacatatatacatatatatgtatacatatatatgtatacatatatacagagacagagacagaagaaagagagagagatacagagacagaagaaagagcaaaagacagagagagagagagggagagagagaaagcaggtgtcaagtaaaaagagagttctttaaattttttatctgtacaggaaatgtaataactaagaatttggggcaaaatagaaaaaaggaggttggtaatagggctttaatatgtcctaataatagggctaataaggtagcctaataagatagccacgtgtctcatcccagcgtttttgacacagttgctctgcagtctcaatgtgtcattctaagatatgtacttccttgcctccaatggatgtatcaattttctggttttctgtttctggccattggttccaccagctgaggaatgaatattatttttacagtgtgactgctcttctaatgctactcatagtgccattcacctgtgcttcctgctgctgctggaatgtgaaggtcaacatggaaagagatttcattctaggaaagcagagatcatggccttaaaaagtcaaaaggtgacatggttggaagaagttttattctttgtttatgttataaaactccaaacaaaaacaaactatcctttcccttatcctgcatactctgggcaagactcgcatgtgtgcttctcatcgttgcatgtctgctatggttgcaccatagcaaccagtgagagaccctctgggcatatggtcacagatgatgaagtgacatagttaatgatggaaatggcattaaatgtgtcctatgaaagtgctacagaagcagaactttctatacaaataaatcaaaaatttttccaagagccaagctgttgtgagtgttaaccactttgttacctttttcttccactttcttttgactcatgttgctatggtatatctttctccatctgtttacttttcacttatatatgcctttatatttacagggttttcttgttaaaaaaaaaacttatatctgagtcttatttttttgaccccctgtgacaatctctgtattttaattgatgcgttttaattaataattaactaaatcgtttcttactatagtcactctgttatgctagcaattactaggtcttaatcttcattcctactattttttagtacccaataaccattcccacttcccccggaagccccaactacccttaacagcctctgttacccattctactttctatcttcataagttcaattgttttaattcttagcttccacaaataagtgataccatgcaaagtttgtctttctgtgtctggcgtattttactgaatatattgtcctcaagttccatccatgtggttacaaatgacagaatctcattctgaatagtactccatcatgtatatgtaccacattttctttatctattcaactgttgatggacactttgattgcttccaaatcttggctattgtgaatagtgctggaataaatataggacagcaggtatctctttgatacactgatttcttttctttggggaatatacccagcagtgggattactggatgttatggtagctgtttttttcatttcttgagggacttccaaactgttctccatagtggtggtactaacttacatccccaacaacagtgtacaagggttcccttttctcctcatcctcaccagcatttgttatttcctatcttttggatagaagccatttttactgggataagatgatttcttattgtagttttgatttccatttctctgctaaatcaatgatgttcaggatcttttaatatgcctgtttgctttttctatgtcttcttctgagtaatgtctgttcatatcttttgccactttaaaaaacatattttgtgtctgtgtgtatatagtacgtgtatatatttatgggtcacttgagatgttttcatacaggaatgcaataaataataatcataccatgcaaatggggtatccaccccctcaagcatgtatcttttgtgttaaaaacaatcctgctatacttttagttattttaaaatgtacaattacattattattgaatatagtcaccctgttgtgctatcaaatatcaaatgttattcattctaactactttttgtactcattaaccatctgcccctgctcccccaatcacccatcactacccttcccagcctctggcaacttcatgagttcaactgttttgatttttagatcccacaaatatttgagaacatgtgatgtttgtatttctgtgcctggcttaccaaaacctatggaatacagtgagagcagcaataagaggaacgtttatagctctcactgtatcccataggttttgatatattggggttccattatcatttgcttaataaaatttttcaatttccttctcaatttctttgtggaccaactggtcattctggagcattttgtttaattcccatgtgtttgtatagtttccaaattttcttgtattatttctttccattttaggccactgtgatcagagaagatgcttgatattatttcagttttttgaatgttttcagacgtgttttgtaatcaaacatctggtgtttccttgagaatgatctatgtgctgaggaaaagaatgtatattctgcagccattggaggaaatgtcctgtaaatatcaattaggtccaagagacaacaaccttcttgtctctttttatagtttttgtcttgacatctatattgtgtgatataaatataggtactcccatgctttttaaacttccattgacatgatgtgtctttttctatcccatcattcttggactaagtatgtttttacaagtgaaatgtgcttcttgaaggcaacaaatcattgggtcttttttattttttaatccacggagccactctatgtcttttgattgaagagtttagtttatttacattccatgttatgattgataagtaaggactgtcttggaaaggctttatttctctttcatctttgaagaacattttcactgaatttactattctagggtaaaagatttttccttcagcactttaaatatgtcctgtcactctctcctggcctgcaaggtttctactgaaaagtccactgccagatgtgttggagctctattttatgttgtttcttttctcttgctgcttttaggatcctttctttaaccttaaccttttagagtttgattattaaatgccttgtggtagtctactttgggttaaatgtgctgggtgttctgtaaccttcttttacttgaatattgatatctttctttaggtctgagaagttctttgttattatccctttgaataaacactctaccccaatctctctctacaccttctctttaagaccaataactcttagatttgcccttttgaggctattttctatattctgtaggcatgcttcatttaaaatttttttttcttttgtctcctctgactgtgcattttcaaatagcctttcttcaagctcactaattctttcttgtccttgatcaattcttctattaaaagactcgtgtattcttcagtgcgtcaatttcattttttcaatgccagaatttctgtttgattcttttaaattatttcagtctctttgttaaatttatctaatagaaatctgaatttttttctatgttatcttgaatttctgtgagttttctgaaaacggctatttagaattctctgctgaaaggtcacgtctctgtatctcctggatcggtctctggtgacttatttagttcctttggtgaggtcatgttttcctggatggtcttgatgcttctagatattcatctgtgtccggtcattgaagaattaggtgtttattgtaatcttctcagtctgggtttgtttgtacccatctttcttaggaaggcttccaggtattcagacttaggtggtataaaatacgctgtatctgcattagggggcaccccaagcccaataacactgtggttcttgcagactcataaaggtaccaccttgatggtcttagatgacatttaagagaattctctggattaccaggcagagacacttattttttcccccttactttctcagaaacaaacatagttgctctcactctgttctaagcctccaggagttggggaagcactgacacaagcacctctgtggccatcagcactggagctgtgctgggttagacctaaaaccagcagagcactggatcccacacaaaacctcctatgaccactacctggctactgcctaagttcactcaaggccctgggactccgcagtcagcaggtggtgaagccagctggacttgtgtccttcccttcagggcagcgagttgccccatgccctgcgtgggtccagagttgctagcgactggtattattagtactgtgtgccagggactggcatcaaaaactttagaaatctacctggtattgtatttattgtggctgagctggcactcaacccacgagatgcagtccttcctactagggccattgacatttgccaacatgagtcacggaacctgttttaagtcttttaagtatattaaccaccttgttttgcattttacaaatgagaaattaagtccgggagatatttaagtgaccacccacagtcacacagctggtggagccaggctgtacacccccagactacccacccagtctcacattgtgccaccctcaccaccgggctgtgctccttcacgtctataaatgggcgtttcagcagcacccgcctcacaaggtcatggtaataactaaaacagacaatgcatgcaaaatacacaaggcagactaagggctcagcaagtgcaactcactgttcctgctgttactgcgattgctgtgtaagctggatatggggtctgatctggatcccacagggggcagaaacatggccttgcgctgtctgagagaagggccctaaaggtccagcctgtcctcaccacctgctctctttggctgtgggtaatggctaggagagcaacctcctggacacagggagccttggcctgaatctagaagagttttccatggagaacaacaggaaaccttgaactcctgccagatgttaaggcagactcataggtggattttggggaaggacatcagctattctggggctgggaactggacaacccatggagcccagcctcccatccaatgaagacgtaagctctgcacagcccagctacggcatccctgacagtctctacttagatgcctcccagcatggagagctcagcacacacacacgcacagacaccctattcgtttacagaatattagaaggtagatactgaatggcaatgggccttatgtaaccagtcataaaattgatgaggaggggggttgtttaaaatgtgtcttcctttacgtgcacacatatcaagggaggcaaatacgatgctaagagagtgaggtacagaacaccaggtatgtctgcaacattttcacagaaatgaggtggagagtgcataaatgcatatgcctctatttgtcatatttgcataaataaactctagcatgaataacttttcagcttaacatgtacttgtttatgtatgtataactatttatatgtttacatatttcacttgcaacatttattccatctgtgtgtataaccagtaatcctccccggtctccactctgtaggaccctgcaaggtgcctggtcattggactttctactgcaggagtgtgtgggatgcacctgagccagagttccctgcagcctaggaggccaaggaatcccagggcagtcaatgtccctggtgctgaaggagatggatccccttccttcccctgcaccctcctctcaccctcgcagcatcctccagacacctggacctgctgtcaggatccaaaagcagtgctttggaagccttagggaggtaaccactgattcccatgcttctactcacattggctgctcagcaaaagtaggaaagtccctactgcaaaaatgtcaatgtcccctctggtgcctggcaactgccagggccagccctacttcttgtatcttccatgtttgaaattttaacatttgaactcacacccgaggttgaccagaagacccagatagctctgagctttgcacctgtgacccactggtatggcattgctttcatgggagtaactgggatttggcagcctgatggggctgatgcactgatttgggggtcactccacatgaacccacactgaattcagggctgtggcatacagacagatcaacagcaaccttgggtgtgggtttctatgaacctgtgtgtctgactttgtatattcattttctggtgtcatctgtagtctgcagtaactaataagggcaaggatggtttttattgaagaagacacaccctttctataatagaaaatgtccaccccctgacctggtgcagtggtacacacctgtaatcccagcattttgggaacctaaggctggcaagttgcttgacctcagtagttagagactagcctggccaacatggcaaaaccccatctctacaaaaagaaatacaaaaaaaaaaaaaaaaaaaagcccaggcatggtggtacagacatctagtcataactactcaggaagctggggtgggtggattgcttgagctcagtagttagaaactagcctgggcaacatggtgaaaccccatctctactaaaaatacaaaaaattagctgggcatggtggcgggtgcctgtaatcctagctgcttgggaggctgaggcaggagaatcacttgaacccaggaggcagaggttgcagtgagccaagatcaagccactgcactccagcctgggcatcagagcaagactccgtctaaaaaaaaaagaaagaaaaagaaatacacacacacacacacacacacacacacacacacacacacagcccacgcatggtggtgcatgcctgtagtcccagctacttaggaggctgaggtgggtggattgcttgagcctgggaggttggggctgcagagagctgagatcacaccactgcactccagcctgggtgacagagtgagactgtctcaaaaaaagaaaagaaaaggaaaggtccacccctgtgtaaactgccaaatgtttcccttcttgctcagcaatatctctgctgttattatcaatgcatgtcatggggagatgacacagatattgagaaggcactttgcctctcacaggttttctccacaaatttagttcccctccatattgctggggaaagtagcttccccaagaatgtgcctggagatacctgttgcattctctctctctctttctttctttttttgatagggtctcactctggcacccaggctggagtgcagtggcacgatcatggctcgttgcagactcaatctcccaggctcaagcgatcttcccacctaagcctcccaggtatttgggactacaggcacatgtcgccatgcctggctaatttttgtacttttggtagaaacggggtttcgccatgttgcccaggctggtctcgaactcctgagctcaagtgatctgccaacctcagcctccgaaagtgctgggattacaggcgtgagccaccacacccagcctctggtgcattttcccttccaggtttcttgttacatgaatttgtaaagatatttgtcagagataaaggtgtggttatgacaacgtaggagttgttcttacaactcctttctcagagaatgcagtcaaagttgttcatgtataactcatgtataacttcaaaatttaaagacagaatatgatgcagcaaggaaaagtgagctaatatttgcagagaacctttcagtgatcaaacgcattgctgggaaaatttcatagattgtatcatttttgtgtcttttagcctagctacaatcataacttttcttttttctttggttttcagcagttttgactactgtgtgtctagggctttgtgtgtgtgtatgtatatatttgtgttcatgtttgtctatatgcactttttagaagttatccctttggaggccaggtgcggtggctcatgcctgtaatcccaacactttgggaggccgaggtgggtcgatcactttaggtcaggagttgagatgagcctagccaacatggcgaaaccctgtctctagtaaaaatacaaaaatcagccaagcctggtggcatgtgcctgtaattccagctactcaggaggttgaggcaggagaatcgcttgaacccgggaggcagaggttgcagtgagccaagatcatgacattgccctccagcctgggagagagagtgagactccatctcgaaaaaaaaaaagaaaaaggaaaaagaaagaaaagaagttatccttttggaattctctgagcttcttgaatctgtggttgattatctctcatacttcctagagaattctcagaatgtctgagtcccatacccactcctcatgtgatgtgtcctcagataagtgaactaacctctgaaactcagtttcctcatctgtaaagtgaaaataataatattaatgaggacatgatgattggcagttcataagcactggataatgtcagctatagatattgttaaagggtgtggtccttccttagaccgagcaaaattggcacttaactgggctctgcacctctgggacccacactcttcagtgtcttctttgaaggaggttctctgggacctgaaatcagccaggatgttcattgactccaggtggggcagtccaggccaacactgattctcagtcagtccaaccacaggaaaatagctccccccaaaaaaatgtccaaagtcccctttggtgcctggaacctggcagagcaagtcctgatccccagttcttccctttcaggcaatcatttattttattttatttttgagatagcattttgctctgtcacccaggttaaagggcagtggtgcaatcacagcttactgcagccttcacctcccaggctcaagcaagcctcccgcctcagtctcctgagtagctgagactatagataggctcataccaccacacccagctactttttgtattttttttgcagaggtggggttttaccatgatgcccagactggtcttgaattccttggctcaagtgatccacccacctcagcctcccgaagtgctgggattataggcatgagccactgtgcccaacctttgaggcaatcttgatcattaaccccaaatgtggggttgaccatatgtcttaagttgttctggacttctacttatgcttctttgtcatggcatttttttttatgaattcacctgggattttgttaatagtgcaaaagagtttattttggggtccattcatcttggacccaggaggagttacaggctctgggtttcaaatggttcaagatccaccacctgagggcctgaggtatgtggggacctgtgtttccaatcctgtgtgtttattatcaggcgctgtctctggtccacagcatccaaagagggcaggtatggtagcaggagtcatttcccctgtgcaccctcagctgctgacccctgatataaccaccagattattgtcagactctgagccacatgctcagccatgtctcaaagatggcctctcctccaaaggttttgacatcattgctctgtaacaccaatgagaccttccagccgatgttttctttagagcccttggtttggtgtctagccttatcaccaacatgccattgacctcagggagctatgagtctgtcttggtctgtttgaacaactatcacaaaatactgtagactgggtgatttgtaaacaactgaatttatttcccatagttctgcaggctgagaagtccaagatcaggactgtggctgatctggtgcctggtgacagcccacttcctggttccagaaggctgtttcatgcctgtgtcctcacatggtggaagtggggaatcagctctctgggcctcctttataagtacaccagtcccattcgtgagaactctgccctcataaccttatcaccactctatgcccccctccttctaaaaccatcacatggaatgtaaggatttcaacatatggattttggaggtacaaaaatcttcagtttatagcagacccaaacctctgaatctaggtttcctcattgacaaactagggataataatggcactttccctactagggagagttggttgtgttcatatcaatactgtatgtgccacctgctatgtgcttaaaacatctgcacggaggaatgttattacaggacgccgaacaccaggcttgagcatttggactttggcagtagaaaaggctctgtcattcaactccatgctggaggcatgttttgagttgttactgtattcccatcactgtcctagaccctaggaacacccagatagatcatatccagtcccagatacatgatctggcaaccacagtgcaatgtgaagagttgtgatggagacatcagctggacattatgaaaagatgtggaggaaggaatgtttcctctgggttttaaagggtcaataggagttctcttggctgacaaagaaaatagcattccaggcaaaaggactgaactcactaaaagtatggagtatgaaaatgcatgattggatatatctatgtgctagggcagtggggagggggagataatccctgactgaaggctgcactatggaatttgaactggatcctgcaggggccagagacatgactttgcactgtcttggagaagggccttaaaagctcagcctggctgggtgcagtggctcacacctgtaatcccagcactttgggaggctgagacgggcagatcatgaggtcaggagatcgagaccatcctggctaacacggtgaaaccccatctctactaaaaatacaaaaaaaaattagccagacatggtggtgggtgcctgtaatcccagctactcaggaggctgaggcaggagaatggcgtgaacccaagaggcagagcttgcagtgagccgagatcatgccactgcactccagcctgggcaacagagtgagactccatctcaaaaaaacaaaacaaaacaaaacaaaaacaaaagctcagcctgtcctcaccattgggctgtagacagcaactttgtgacaaccctccttggcacagggagactttcatctaaatccaaaagatatgtgtatggaggagtagtaacaggagctctagaacaactgctaagcattgagcaggactcacaggtgaattcttggggaagaggtcagctgctctggggtgctgggcaccacccagcttcagcatccccaagagccaataatctctgcttgaatgcccctcagcacagagagttcagtgtgtgtgagcctgtgcatgcttgtacacacacacgctgccttaacaaaacacgtaaaggtaaatactctaaagcagtaagcatcaaacataaccagttggaaaatcaataaggagggggattgtttaacatacatcttaaaatgctatgtgcacacatgtcaagagagttaagatatgataccaaggataagaaccaaatgcacaacaccaggtatagtctgcaatattttctctaagacagggtgaagtgtgagtaaatatatatactcatatttatcatatttgcatagatgaactctgaagtgaataattttcaacttaggatatattaaacctttatttaatttcaagtgtggaggattttctttctcttttgacaatcagtgcttctcccaagcccccactctgtgggaccctgcaaagcgctcaggccttggactcttaactgcaggaatctacaggatgcacatgagcaagcaggcgctcctgcagccacagaggccaaggagtctcaaggcggtcgctgtccctggtgctgaagagggaggagcctctacaccccctgcaccctcctctcaattcccagaacacctggcacaggatgaagtccgggttgtgcttcacatcagcctgttcctgggtcactgggagattcaaaagaagagctatcagggactggcaggggtggccaggagtcctcgggaggtgtccactgagtccccagcttgtgctcactttcgccactcagctcttcctgcagctatatcagcttcttagaggatagtgggtggaggatgaggtcaaatgtgcaatccccagcccccaaccccactccagggttctcagaacccagaaaccctccaggatctgtggttcaacccagcttttttctagctcctgtttcagtccccaaggatcagaggatttgtccagctcccactgcacactgcccccaggaccagctctactcacccctgacagcaggcccactagtatcccccaattcagaactccagaagctcccccggtgagctcagctacatggtggtggctgactccgggggtctggagggtggtcaggacaatctcagagggagagaagggccatgcagccagtgtctgggatggggcttagctctgtgggcctgtgggctactcttttaaaaaaaaaaattttgagacagggtcttgttctgtcaccaggctggagtgcagtggtgcaatcgtggctcactgcagccttgacctcccaggctcaagcagtcctcccaccttagcctcctgagtagctgggactacaggaggatgccatcactgtgggctgctcttgaaaaagagctgcttcctctatttctggaaattctcctcccctccctttatcctctctcgatactctctcgaccccctccccaagcccacactgcatcctacacacacctgatgccctttctcttagaagttaccatgtgccacttctgctaaataacatcctctcgccatctcattaattgcttacagcagcctctgaggtggattcatggtgaaaatgatgacactgaggctggatgaggttgtggctctcacccagggatgtacatcttggaagatgcagagctaggacttgaatcagctctgcctgaccccagagcctgagttcttaccacaaagccaccctgccaccagaccctgatgttctcgtcatgttcaccactggctgtttgtaaggggtcacttgccattgagtcttgctccaagttcacctgatgaaacacatgaggtgtctccaaggctggggacaaaaaagaggacacagccccctctgcatcccttgccatccccacagcagtcgagctactccaaggccctggctatcccttctttttcatctctgccctgactctgtggggtccttcatttgcgagatgggaactggggatcttgggtcactccaatcaccccagaccacaccaggccagccccggctcttttatcagaacaatgccgagaaaagtgaccactacaaacagagtcagggtcaccgtcaggcgatgaactccagggatttaatgtttgatcccatcattctggggagaaattaattcaaaggaggtctggtagcagagaagtacccaccaacggacacgccctgacctcggggttttctggttcactctctggcccactgggggtgaactttctgatgttgagttctgtcctgataagggagaagatatctacatgttgacctctcctctccctgcctggactctggattctaggttgaagtattatttatgctgaggatttacaatgtctgatatatctcgctgagccttctgcacagagatacactgggagtggaggctaatcatgtcaaaggagaagcaccataagcccacactccagcctatcagagtggattaaaggtctaccctgcccaactcttacctcacctgctcccatggcctgggtggagggttggaccccaggactatgaggttgtgtggagacttccagccccatacctgccctcagaccagtcttcagctcactctgctctgggctgcccagatttatttatttatttatttatttatttatttttggagctggagtctcgctctgtcacccaggctggcacaatcttggctcactgcaacctctgcctcctgggttcaagcaattctcctgcctcagcctcccgagtagctgggactacaggcgtacaccaccatgcccagctaattgttttgtatttttagtagagacggggtttcaccgtgttgcccaggctggtttcaaactcccgagctcacgcaatccgccctcctcagcctcccaaagtgctggggttacaggcatgagccaccgtgcccagcctgggctgcccagatttacacaaatattctccactttacacaactctacacaaatattctccactagttcttaaaagaaaactgcctccatcaaatctcacacatttccttcctggctcagtccagggagaacattatctagatagcttgtcatcaaataaaatggtgggggagagaactcaggcagaggggcacaaaacggattgagcagcaagcttcctctccaaccatgattttctgtccatggtcatggatactccctggactgctgccagcacatgtggttcatgctaggtttctggtcaatgtagcatccaaaatctcacatcttctttctagatggagctgtggctatttcaacttaggcaagttgtgcttgagaatcttctcctttaacactacagggtaaggtagttccccaatgcttttatttactttcatttacatttagaaattaggaatttaattcaacaagaagagaggagagaatcgctattattgagtggtttctacttccgaatcctgtaatcagaattttttctgtaattattacagtgctaggaccctcagagctttaaagccctttttcgagattccaaagctagtaagtggttctgctggcatttgaaatataatgtcactgggtttaaaattacttttcttgggccgaaggtggtagctcacttctgtaatccagcaccttgggaggtcaaggtgggaagatcgcttgagcctaggagttctagaatggcctgggcaacacagtgggacttcgacgctacaaaaaattaaagaattagccgaggctaggcgcagtggctcacgcctgtaaccccaacactttgggaggctgaggcgggcagatcacctgagcacaggagttccaggccatcctgggcgacatggtgaaaccccatctctactaaaatacaaaaaattagccaggcgtgatggtgcatgcctgtagtcccagctactccggaggctgaggcacgacaatcgcttgagcccaggaggcagaggttgcagtgagctgagatcaagccactgcactccagcatgggctacagagtgagactccgtctcaaaaaaaaaaacaagaattaagaattagcctggtgtggtggtgcatgcctgtagtcccagctactcgggaggctgaggttgggggctcacttgagcccaggagtttgaggccctgattgtgccacagaactccagcctggagttcagtgacagagtgaggccctgtctcaaaaaataataaaaataaaataaaattagttttctttcctgtatgccactctgcctgactaaccttaaaaaagtaatctctttaaacacctgtgcaatttacctaactatatttttcataatgtcctttgacctttatacttattacataaatattttacatgcttatcatttaaatatgtaaacaactgatatagaccttgtgtttctcataatttttatcagctacataatgttggatcatatttatacactatcattcacctttgatctatccaaaatatttgaggaaggagaaagaaaagaataaagaaataaagtgtgatataccatctaaatgggcctacaattgctgaacattgatctgtttccatatcataaaaatattcctaggtttggtgcagtggctcatgcctgtaatcccagcactttggggggcctaggcaggtggatcacatgaggtcaggagttatagaccagcctagccgacatgatgaaaccccgtctctactgaaaatacaaaaattagccaggtatggtggtgtgcgcctttcatcccaggtactcaggaggctgaagcaggggaatcacttgaaccccggaggtggaggttgcagtgagccgagattgtgccactgcactccagcctaggggaaaaaagtgagaccctgtctcaaaagaaaaaaaagaaaaaaaagaaaaaaaatgtgacagacaatctgaataggcctacaattattgaaaattgtttccatgtcacaatctgtttccatgtcacaaaaatatttctctctagtattttgttctgacagctcaaatatagtaggagaatactaattttaaaaagagaaatgaatcaataagtaattaataaacaaccttccagaacagaaagcctcaagcccagattgatttcactgataaattccacgaaacatacaagaaagaaagtatgctaattttctactatctcttttggaagacgaaagcagagaaaatatttctcaactgtttctatgagaccagcactgcgctaactactaaagcaggcaaaaacattaccagaaaataaagaaaaaaaggaagggaggaagaaaagaggtaagggggaaatggagggagggaagaggaaaggaagggagggagggagggaggggcggaggaagaaaggaaataagaggaaacgatactgaccaatatttctgatgaacatagatatctcaataaaatattagcaaattgaatccaacagtgtataaaaacaactgcacaccacaaccaaatggcatttatcccaggggcataagattgtttgaatatttataatcagttaatgtaaaccatcatatcaacaggctaaagaaaaaattatctaatcataacaatggatgcggaaagagcatttgataaaaaaattaaacaccaattcgtggctttcttaatgctcagtaaaataggattggaagggagcttcctcaacttgataaagaatatgcaaaagtaccctacagctaacatcatacttaacggtgagaagctagaagcttttccgccaagatcagcagtaaggtaaggatgtcctctcttaccattgctgttcaacattgtactggaagtcacagttaatgcaataagataataggagaaaattaaaagtactcagattgtggctgggggtggtggctcacgcttgtgatcccagcgctttaggaggctgaggcaggcagatcatgtgaggtcaggagttcgagaccagcctgtccaatatgatgaaacccagcctcaactaaaaatacaaaaattagtcgggcatggtggcatgcacctgtaatcccagctacttgggaggctgaggcaagagaatcgcttgaacccgggaggcagaggttgcggtgagccaaggtcacaccattgcactccagcctgggcaacaagagcaaactccatctcaaaaaaaaaaaaaaagtacgcagattgtaaaggaagagacaaaactgtctttgtttgcagaagccatgattatctatgcagaaaagtcaaaagaatcaacaacaacaaaaaaaactagaatttataagtctttatgaaagtttgcaggatataaggttaatacataaaagtcaatcacttttctatatagcaatgaacaagtggaatttgaaatcaaaaccacaataccattgacactggtaccctgaaaattgaattacagatgtatgaatctaacaaaatatgtacaatatctataggagaaaaaggacaaaactgatgaaaaaaatcaaagaactaaatgaatagagagatattccacattcatgattaggaaaactcaatgttttcaagatgtcagttcttcccaacttgatctatagattcaaagcaatctcaataaaaatcctagacaggtttgtgaaatggggaaatgattccctatttaataaatggtgctgggaaaactggctagccatatgtagaaagctgaaactggatcccttccttacaccttatacaaaaattaattcaagatggattaaagacttaaacgttagacctaaaaccataaaaaccctagaagaaaacctaggcaataccattcaggacataggcataggcaaggacttcatgtctaaaacaccaaaagcaatggcaacaaaagccaaaattgacaaatgggatctaattaaactaaagagcttctgcacagcaaaagaaactaccatcagagtgaacaggcaacctacagaatgggagaaaatttttacaatctacccatctgacaaagggctaatatgcagaatctacaaagaacttaaacaaatttacaagaaaaaatcaaacaactccatcaacaagtgggcgaaggatatgaacagacatttctcaaaagaagacatttatgcagccaacagacacatgaaaaaatgctcatcatcactggccatcagagaaatgcaaatcaaaaccacaatgagataccatctcacaccagttagaatggcgatcattaaaaagtcaggaaacaacaggtgctggagaggatgtggagaaacaggaacacttttacactgttggtgggagtataaactagttcaaccattgtggaagtcagtgtggcgattccttagggatctagaactagaaacaccatttgacccagccatcccattactgggtatatacccaaaggattataaatcatgctgctataaagactcatgcacatctatgtttattgcagcactattcacaatagcaaagacttggaaccaagccaaatgtccaacaatgatagacttgattaagaaaatgtggcacatatacaccatggaatactatgcggccataaaaaaatgatgagttcatgtcctctgtaggaacatggatgaagctggaaaccatcattctcagcaaactatcgcaaggacaaaaaaccaaacaccgcatgttctcactcataggagggaattgaacaatgagaagacatggacacaggaaggggaacatcacacatcggggcctgttgtggggtgggtggaggggggagggatagcattaggagatatgcctaatgttaaatgacgagttaatgggtgcagcacaccagcatggcacatgtatacatatgtaactgacctgcacgttgtgcacatgtaccctaaaacttaaagtataataaaaaaaaatcctagacagttattttgtgaatatcaacaacttgatcctacagtttatgtgcaggggcaaaagacccagaatagccaacacaatattgaaagattaaaacaaagttggagggctgacactatccaacctcgagacttaccataaagctacagtaatcaagaaaatgtcatatcagtgaaagaaaagacaaacaggcccatagaacagaatagagggcccagaaatagatcaacgtaaatacagtcaactgatgtttggcaaaggtgagaaggcaacatgatggagaaaattagtcttttcttttcaaaaaaaaagaaatggtgctagaacaactggacatccacacacaaaagaaaatctagacagagatcttacacccttcacaaatgtttattcaaaatggaccatagggctgggcaaggtggctcaagcctgaaatcctagcactttgggaggccgaggcgtgcggatcgcttgagcccaggagtttgagaccagcctgggcaacctggcgaaaccccgtctctactaaaaatatgaaaaattagccagtcgtggtggtgcttgcctatagtccctgctactcagaaggctcacctgagctcaggaagttgagcctgtggtgagccaagatcgtgccactgcactccagcctgggcgacatgagtgagaccatctctcaaaaataaataaataaatgaatgaaaataaaaactaaataaatatataaatatataaaataatttaaaaatttaaatggatcatagatctaaatgtaaaacataagattataaaactcttaggaaataacatagagaatctagatgatcttgggtttggcaataaatttttagatatgacaccaaaggcataatttataaaagaaaaaatgataagctagacttcatcaacgtcaaaaatttctgttctgaaggctgggtgtggtggctcatgcctgtaatcccaggactttgggaggctgaggcaggcagatcacctgagatcaggagttagagactagcctgcccaacatggtgaaaccccatctctaccaaagatacaaaaaaattagccaggtatggtggcacacacctgtaatcccagctacttgggaggctgaggcaggagaatcacttgaacccgggaggtggaggttgcagtgagcagagatcgcatagctgcactccagcctgggcaacagagtgagactctgccacaagaaaaacaactaaaacaaaacaaaacaaaaattctgctctgcaaaagacactggtaagaggataaaaagagaagccacagacagtgaaaaaaatatttgcaaaagacatgtctgataaagtactgttatccaaaacatacaaagaacacttaaagctcaacaataagaaaatgggcaacccaattcaaaaataggcaagaggtctgaccagacacctcctcaaagaaggtatgtggatggcaggtgagcttaggagaagatgctccacatcctatatcatcagggaaatgcaaattaaaacaacaatgaagtatcagcacacgcatattaaagtggtcaaaattcagaaaacttacagcaccaaatgctggtgagaaggtggaacagcagcaactttcatcattgccgccgagaatgcaaaatggcacagtcactttgaaagacagtttggcagtttcttacacaactaaacatactcttgccatacaattcaggatatgtgccccttactgtttacccaaaggagttgaaaacatatgcccacacactgtttatagcagcatactgatgttcacagcagctttatttataattgaccaaacttggaggcaatcaagacgtccttcagtagctgaatgggtaattaaactgtgatatgtgcaaacaatggaatatattcagcatgaatagaaatcaaccacgaagtcatgaaaagacatgaaggagcttaaatgcatattacaaagtgaaagaagccaatctgaaaatgctacatattgtattattccaactatacaatattcttgaaagggaccagcctgggcaacatggtgagaactgtctctacaaaaaaaaatatatatatatacaaaaattagccaggcaatgcggtacatgcctgtagtcccagctactcaggaggctgaggtggaaggactgcctgagtccaggaggcagaggttacagtgagccatgattgtgccactgcactccagcctggatgacagagggagaccaaagaaagaaggaaagaaagaaagaaaaagagagagagagagaaataaagaaagaaagaaagagagagaaagagagagagagagagaaagagagaaagagagagagaaaggaagaagaaagaaagaaaaaagaaagaaagaaaggaagaaagagagagagaaagaaagagagaaagaaagagagaagaaagaaagaaagaagaaaagaaagaaagaaagagagagaaagaaagaaagaaagagagagagaaagaaagaaagagaaagagagaaagaaagaaaaagaaagaaagagaaagaaagaaagaaagaaagaaaagaaagaaagagaaaggaagggcagggcagggcagggcaaggcaaggcaaggcaaggcctatggagacagtaaaaaatatcagtggtttccaggagatagagggaagggaaggatgagtaggtggagattatagaagatttatggcagtgaagctattttgtatgatactataatagtagacacatgtcattatacatttgtccaaagccatagaatgtacaacaccaagaatggactctaatatgaactatgtaccgtgagcgataataatgtgtcaatgcgggttcattcattttaacaaatgtgccactctggtaagggatgttgatactcaagaggcttgtgtgttaggagggcggagtaagggtgtacaggaactctgtgttccctgatcaattttgctgtgacactaaaacggctctaaaaaataaagtctattgtccaggcacagtggttcacgcctgcaatcccaacactttgggaggcttaggtgggagcatcgcttgagcccaggaactcaagaccagcctgggcaacatagcaaaaccctgtctctaaagaaaattaaaaacattatccaagcatggtggcgcacctgtggtcccagttactggggagtctgaggcgagacgatctcttgagccccggagttcgaggctgcagtgaaccatgatcacaccaccacactccagcctgggtaacagagcgagactctatctctaaaaaatgtctattttaaagaagttttaatacatgcagtggaaacacacaaaaaataagtcagatgctacaaagtgatctgtgaaaactgaatttcccttccacctgcaaaacttagtctcctaagacccactaaatttaattgccagttcataaatgtatctcttccagatacactttagaatcttcttgttgagttccacaaatatcctgctgggatttcatttggactgcaatgatttatttaattaaattttattttattttaagttccaggatacatgtgcaggatgtgcaggtttgttacacaggtaaatgtgtgtcatggtggtttgctgcacccaccaacccatcacctaggtattaagccccgcatgcattagctatttatcctgatgctctccctccccctgaccctcccaacagactccattgtgtgttgttcccctcgctgtgtccatgtgttctcattgttcagctcccacttctaagggaaaacatgccatgtttggttttctgttcctgtgttagtttactgaggatgatggcttccagctccattcatgtccctgcaaaggacataatcttgctccttttatggctgcctagtattccacggtgtatatgtgccatattttccttatccagtctatcactgatgggcatttgggttgattccatgtctttgctattgtgaatagtgctactgcaatgaatttataggttcgttcaggtatcttcccatttaattttgtgtttgtgcttgaaatttatgagaactgtttcatgatccctcgttttaatagcaccattttcttctctgggtgcactgtcatgtgaagaagtctctggagagaatagtgaggagtcaagctcctggttaaaaacctacgtgagggcaggcacagtggctcacacctgtaaccctggcactttaggtggccaaggtgggtggatcacttgaggtcaggagtttgagaccagcctggccaacatggtgaaactccatctctactaaaaatacaaaaattagccgggtgtggtggcaagtgcctgtaatcccagctactcaggaggctgaggcaggagaatcacttgaacccaggaggtggaggttgcagtgagccaagatcacgccactgcactccagcctggatgacagagccagactctgtctcagacaacaacaacaaaatcccctccatgtgatctttcaagcctgaccgtaggcaattatagaattacagaggctttaactggcagggctcatgggggaaattgtcctccccacaccagacccagtgcataatcaatgcgtcacagtctcctaggagagttgcagtcaaggactcgagtccccttgaccagccatggtcttacacgtatctcctttcaaagttacctttattagttaccttcagcggagggcttccttgggcacctctgccaagacatccttgtcatagaaaaacaggggaaacatgaagacacactttcacccactatgactcagtacccagtacttttccacacctagcccttcctcctcttcctccccttagcctccattccataaaactgcagaagccttttgttgtaggattgtgcagcagtgagatgacccccacgtctgtgcaatctaccttaccctcaaatcaccatttggtgatgcgagtgggaaaaaatggaatggtagaagctggtgctttctctgatggagcctcattcctgtgctatcacagcaagtgatgaaagtcttgactgttgctttagtgtgggtgatatggtttggatgtgtccccacccaaatctcatctagacttgtagttcctaaaattctcacgtcatgggagggatccagtgggaggtaatcgaatcatgggtgtggtcactcccatgctgctgttctcatgatagtgagtaagttctcatgagatctgatggttttataaggggcttttcccacttttgctcagcacttcttgctgccaccacgtgaagaaagacgtgtctgcttccccttccaccacaactgttaagattcctaaggcttcccaagccacgctgaactgtgagtcaatcaaacctctttccctcataaattacccagtctcagttatgtcttcattagcagtgtgagacctgactaatgcagtgggcttgctatcttcactgggtccttcaacactgggcagctcagctctctctccttcttagctgagcccatgacaaatggaaatgagcaaattattgggctgtcttttcttccttctgttgggtctgttgcttggagattagttctgtttcatctggttcttcctcttttgaggcaagacaatagcagagggaattggagaattggaggctggataaaggatggaatgagtaggagtagaagcaggataaagaggtgggtgagcaagaagcaagataataagcagaagttgagcagccaaaacaaaggtgagataaaataagtgagtaaagagaccccatggccagcaagatctggaccaaacctgtcaggggcagctcctcagagatgggcatgtgcatttgaggaaaaggtatccttaaaatgaccgcacatgatcatcagctacttaaggttcatgcatatggactgcatatcgtgcatgtacttaaaagtatgggatggaggcaacatgcaagtgcacaagggtcaaagtaactaagtaacccacctatcaatcaaaaggcagacactggctaaagattaggcagccttgggaaaagaagagaaaaaaacatatcaaagaaacccaaatacacctaactggtgctgatctcatttctcaaaggtcagtccactctcccttttccaagagtgtaatactgtgcttaataaacttttgctgctttgctatctgtgtgcatctcacacaattctttgttcagggcatgaagagcctggaacagcgtgataccatctggtaacactttaacgcccttaggtaaatgctgggtaaacatggattgccctgctgatgagtgagggaccatgttgattattattgcttttgttctctttggttttagatttacttccacatcaggccttttggtagatgggtgggtcagaccctatcaacaggcatgggttgggggcttgcaggcagcctcaagactccttccccatagctaaatttaggaagacttgacttgggaaggctgaggctttcctgaatttcttttagtgttctattctttgttgcattttttctctgttcactgtggagatctggagcaagcgctcattggatgtacttctcccccagactccaaaacccattgggatgcaccactcccacacctatagagagaggaagagagggagaggaggaggagagagtggcagcatctgtcctttctgagaatgtgaactgagacgccaaaacagatgcccctgtatcaactaagacgggccctaacattaaggagagtgaagcagtgtccttgtctggggtaaatgctcaaggttcttgtctcatgccagggaaattgaggatgcagacacacaagaagtgagtttaagagtggaagtttaataggtgaaagaaagagaaaagagaatagctctctcttctgcagagagagaggggctcccaggtgggacttccagtccagcaaagtgcatggggttttatagactagcttgatgaggcagtgtctgatttacaaaaggcccaaagattggttggaccaggtgtaccatttacatactgcgagaagaagctggccaccccaccctaatattttattatgcaaatgggtaatctacctgacctgcgccacgttacctctttctttactgtacatgtggttgacaaagaaaaggaaagatggagcagccatgttgaacatgtctagtgcccaggcagccttttcctattggcacagctgctatgcaagcttccatcttgcttatctatctctgcagcttgattttacaggctgctgtttattagaaaagaaatgatttggggttgcttttcattaaaaggaaaaccttactgagtgaggctaagagtgaaggattaataggcaacagaaagagaaaagagaatagttctctctcccgcagagagataggggcgcccaagtgggtcttctagtcccgtggcaaagtgcacagggttttgtagactggcttgaggaggctgtgtctgatttacatagggcccaaaggttggttggaccaggagtgacgattacatagtgctgcaaagaagctggccatccaccctaatctttcattatgcaaatcgattttctacctggacagcagcatgttgcctgctccttactatacacgtggttggcaaagataagggaagagggagcccccacgttgaaaatgcctggccctcagatagccttttcctactggcacagctgccagcattctcccttgcaagcttccagcttgcttatctatgtctgcagcctgattttacaggctgcttttgttagaaaacaaatgatttgggggctgcttttcattaaaagggaaactttactgaggactctcttaccctcactacctgcctaaataatttctttttaatgcctgtatcatttaggatagaaattcccaggatccgtggtgcttccatagcaaaggaagaacgtctccagggagatgactttacagttgagccctggatgatgagattcgatcatgaaagaattggagaagagcatcctgagggcagggacaggcaagtcaaaaggtcccaagacaagaaaagatcatccatgcgggggccaaggccagggtggccacgaagaagggagaagagctggagaggagatgtgaagagttagcagggctcagtggtgcacagtcccttaggctgtgaaaggagatcagcatctgtagccgaattttattttgagacattaactgaagctccttctattctcctaccccttacccttccaggtgctcccactgacagagcaggagcatcgccatcttggacaagcaccaccattttaaagtttgccttgatcaaaactgcctaaatccaaagggcatcagcctaatggctaaggtcagcatgaccataaaccacaaatgacatctccgaccagaaacattccaaccctaagataaacccctccccaaccagagacatgccagccctgagataacctcccctccagccggagagatgtctgcaccaagacaatctcccctttgaccacagacattccaaccctgccataaacatttcccccacaaagaaacattccaagcctgtaataagctctctcaccctaaaaccaataaatacccttagtctgtaagagagagtgctcctgaccgaaatcagccagaagcccctatcaggtctattctccaaaataagcctgtctttgttgagcttctttttgtgtttctttcgtctttctttaactcttacaccaccactcttggaaaacattgccgcctatatgcacagccctctaggggtaacgctgatccaatgagcacaaatatttcaatttttgctttggatctccaagacactgtcctaaaagtcatggcagaaccaactgtcttgaaaggcaacatgctttaatagccaggctttctgagagaggaagtaataatgggcagattttttgagcatttactgtgacctggcactgccctgagtcctttacacttagtcctctggacaactctgaggtaggtagtgttgtccccattatatggttaggacgctgaagctcagagagggaaattaacttgcccaagtcacacagcagaaccgagatttgagcccaagcagtccagttccagatcccgtgcctttgggtgatgtctgcttccaatggtttggctttgaatctcaagggtcaaaagggatggctctgactccaatcccaccccaagatgggccagggagacctgtgctgggaatggaggagaaacctagagatgaaagggtggggcccgtcctcccactgacactcatgagagtgccgggcacacagtggaggagggaatggtgggagggggttgtggtagcacctgttgaccaggctgcctgggcagcatcagggagcccagaagagaaagggagggggctccctgaaggtaggcaatgggggctacagaggaaagcaactagaagggcagacatagcagggggacattggcaaggaaaggaactaaaaattctgaagcgccagccagggcggaagatgcacccctctttccctgtgctctgggctggccaagggcctctgtcttgggggcaccagcagcccagatgaatggatctacctctacaggttcttcttccttactcagagcctcagtctttctccttaaatgcctttataaccctggtccctctcctgctcaaatacctcccatagctccctattgcccactggataaactccatagttggcctccaagagaacctgctaccagagtgtaggtctcgtgttcagccagggaggcagtcagggtgttgctctcagagatgcccccctgccctgatcccctgcctcccactgacccagcccacctctgaatcctcacagtccccaagcaccccgtgatggctctgggtgagactcaggcaaagaggacagcacagttttattcatgggattctgcaaaggtgtgggtgggtggcttgggtggggtccaaggccaagcggctatgggtcactgtgggtctgcgctcaggggcttcacccacagccaaagtccgccctctgcatacattatgacctccggcttcctgcggggctccatgtggtctggacagacacggaagcacagcagcgtgagcgccaggaccaccttcatctcagccattgcaaacgcctgcccaatgcagttcctggtgcgggggaagggactctgactgcacccaggacccgcatcccggccccatccctggccccagaccctgaatcaggcccacacaactctgagtttttacacttagtcctctggacaaccctgaggtaggtagtgttgtcaccattatatggttgggaaaataaagctcagagaggggaattaacttgcccaagtcacacagcagagctgaggcttgagcctaagcaatctgatccagatcccatgcctttggggtggtgtttgcatccagcggtctggctttgaatctcaagggtcaaaagggatggccctgaccccgaccccaccccaagataggccaaggtgggctgtgctgggaatggaggaggaacctgtaggtgaaagggtggggattcgccctccccgtgacactcttgggagagcgcctggcacacagttggggagcgagagggtggtctcaggaagcatctgttggccaggctgcctgggtagcatcaggggacccagaatagaaagggagggggttccctgaaggcaggggaagtgggtcacagagaacaccaaccaggaggggcagacagagcagtgggacatttgcaaggaagggaactaaggattccaaaagccagccagggaggggcagagaagggagctaactgtgcctgggacccccatatgggcttgcatatccccggagcctggcccagactccagccccagctgagaccagcagagggggtgggggctctgagcatatcacagactattcttggaactacccaaacctgttctatggacctttgcccataaactccagaggaggaaaggaaaggaaatctggaactgggaccatctgcaacatcctcagttttcaagccccacacccatcaccccatccctgcctcagacacaggccacccttgtctggaccctgctgagaagggaataaaagccagaggtgatctctctttgctattctctgggtcaaagcggaaggggtcatagacctggaggtgagaccaagaagggttgctgggtggggtctcccaggtatgccagccttggagagacagacagttgtgtgtgtcttggagggaggtgatgttggattctcttggtcaaaaccctgccccctcctctaggacccctaaaatggaccttaaaaaggggggtattggggaggcagcacctcagggtccagccacacagttgggttgtggtgagtctcaaaattactgaagagacagacaatgcctgtaggagagaagggggcagtcaggacaaggtccccctgcctgagaggcccctcttcctacccaggaggcacctccccatgaggctgtgggcacctttggggatgactcagccgcctgggagcacaatgtcctgggtgcagcatcgggagatgacagggactgggggatgcagccacaggctgtccttaatgtacatggtcaggaagggcagctgggccaggtcatccctaaagaaacacccagccccaatcattatcaaggtagcaaagacacaactctccagttctctgtttgcaagtgagaccttttctccctgtaacgaactccacatggaacaaatgtttgaggattagaaaaccagaaaaaaaaaatagaaagattccaaagaaaatttaaccaggtagtttaaaaagacatattttttaaaaaatcaaaatgccaactgtaaaataaaaaaaatgaatttgcataaaaataagtattctttgtgacaagagagcaaactcataatccaaatgaataagaaacaaaatatactttcaatgttttgctcatattcatcactgcactagagatactagcaaatgcaattagacaagggaaaaagagaatatgtaatttgaaatgtggggtaaatgtatcattttggaacagtgattctgagtcttttaatagagtttaaaatttgcttagatatcttaggcatattttgttaaatccactcctagatacttttgttgctatggaaaaatgtgtcaccttttatttgggttcagggaaatttatgaattcatttggaatatagagattttgtgtttcttgttaaatttaatccaggtattttatattattattattattattattattattattattattattggcatcttttctttcatgctgttttccagctggttgttatttctaccaagaaagactaatgaatacatataaattgtgtgcccaatgaacacagtacatgctaaaaatggtgtctcatatcaatagcaaaattattgatcatttaataaaagcccttgggatgactggggaacagcatggaaaaagagtaaacttaacctggttctcatgtcttataacaagataatgtccagatgaatcaagtatttaaaaaaaatttttttaaagaatcttaaaagctatagaagaaaccatgggaatattattttatacttccagattaagaaaaccttattttcacacaggtcccaggagatatacaagaagagagcaatatgtacttaaacgagaaaagggccaggcgtagtggctcaagcctgtaatcccagcactttgggaggccaaagcaggtggatcacaaggtcaggagtttgaggccaggctggccaatatggtgaaaccccatctctactaaaaatgcaaaaattagccaggtgtggtggcctgcacctatagtcccagctgcttgggaggccgaggcaggagaattgcttgaacctgggaggtggaggttgcagtgagccaagcccatgccactgcacttcagcctgggcaacagagtaagattctgtctcaaaaaaaaaagagagagagagagagaaaagatacaaagcagtccatgcagcgtatagtatgttactgtggaattttttaaagatgctaaaagtagctctggaaaaatacataaaaatataataacttagacaatctgtgtgcgtgtggaatttgggtggttttggccattggggtgagtaaactttatagattttgaaccagttaagtgcattggtattaaaaatttaaacagccacacaaaaggaagaaatgtcaagaaaaagaattcagctcccttactgggtcatcagtgtttgtaaaagttttctgatggattctcttgtttcttttaagtacagaatcagaatcactgtctgccaaaatgatacatttacccccacatttcaaattacatactcttttttccttgtctaattgcatttgctagtatctctagtgcaatgatgaatacaagcaaaacattgaatgtatattttgtttcttattcatttggattatgcgtttgctctcttgccacaaagaatacttatttttatgcaaattcattttcttttttcttacagttggcattttgattttttaaaatatgtctttttaaactacctggttaaattttctttggaacctttcaattttttttttgtggttttctaatccccagacatttgttccatgtggagttcgttacagggagactagatggatatccaatccacacactagggtagaatgtatcactgctatgtgaagtaacccattttccacatatcaatcatatatccaagtcaaccaataaaatatattcaaatcaactttaaaaatctatctgattttttgaggaagttgataaacatactctaatttttttctgaaaaataaaagatcacgaagaactaagtcaatctgaaaataaaatttaaagagagggaagtcattccacccagtattacaaactattacaggctgggcatggtagctcatgcctgtaatcacagcatttggggaggtcaaggcaggaggatcacttgagaccaggagttcaatacaagcttgggaagcaaagtgagatcccaacttgacaaaataatttttaaaaaattagccagatgtggtggtgcaggcctatagtccgagctagtcaggaggctgagatggactgcttaagcccaggtattcgaggctacagtgagctgtgattgctcaccactgcactctagcctgggcggcaaagagagaccctgtctccaaaaaagaaaaaataatgttaaaaaaacgactgcaaagtcacacgaatacaaatagtgtggcatcattgcaaaaataagaaaatagactcatgaaacagaatggagaactcagagacagacacatgaataagctaaaatgtcacatctggtaaagggagtcccctaaaactcttggagaaatggatggattttctggctgtagaagaaaaaaagtggaggaatttaacttcatagaaattcatcaaaagtatcctccaaaagttaaaaggcaatagtttgtaacaaaacagagaaaacaagattaattttaatacacatttgtaaaagtaaatatttttaaagaatccaaaaaaaaccagcaaaaaataagaaaaccacttccataaaaagaaaacaaataacttatcaacatgtgcaagagatgttcaatctcacccttaattaggaaaatgttcattaaaagtagaaatataaagattgacaaagatttaaaattcaatagtacaacactacttttggtaaagttactggaaagcctgtaccatcaaatcagctaatagaaatggactttctatcataattgaagttgtacagtgcaaatggtctttgattcttcaattccacttcacagaatttgtcctgcagaggtgtctacacttgtaagcaaaggtcactgtaaacacatgccaactgcctatggaaacctttacataagtgtccaatataggaatgagttgaataaaatgtgaaatagaaaaaaaaagctgtaagacacactgttgagtgacaaaaaccagttataaaatgtatagatacgtatatgcaaaagggaaaaagtatatagatgtatatgaatattgatgacatagataattcatagatagaagatacattgtagatgatgatgattgatagaggaaacagaggagagagagagataaacagacaattctatggctctagagacccatttggagaaagggagggaattaagtggggtagaaggattgtcaaggataacccttgtcttatctgtaatatctcatttggtgcaagaagaacttgttctcatcattgtttttgtaaattaatgctctttttccatgtggtatatatacacaatgaaatatcattcagccttaaaaacacaaaaaaatatatatcatttgccacaacatagaagaacctggaggaccttatgctaagtgaagtaagacaggcacagaaagacaaacacgcatgatcttacttatctgaaataagtaaaacttgatctaaaatagtcaagctcatagaagcagagagtagaacagtggttactggaggccagggctgaggggaagggagaggaaatggtgagatgttggttaaagggtacaagtttcagttaaagaggaataagttcagatctattggacacagcatggtgactttagttaacaacgtattgtattacctaaaaatgctttaaaaaaaatttcaaatgttcttaccacaaatatgataagtaaatggggtggtgggtgagttcagcaccttgatttaattaccatagattgtatatatatatcataatatcacactctataagtatatataaataaaatttctcaattaaaagtaaaaaacaaactcatttcccaaaacttgttaattgagaaaatttttttaaatctcacatatatatacatatatatgtatatacacatatatacatgtacgtgtatatatgtatatatgtatatacatgtatatatatacacatatatatgtatatatacatatatatacacacatatatatacatatatatatgtgtgtgtatatatatatatatgttgtttttttttcttttttttttttttgagacagagtctcattctgtcacccaggctggagtgcagtggcatcatctcaactcactgaaatctccacctcccgagttcaagcaattctcacgcctcaacttcctgaagagctgggactacaggcatgtgccaacatgcctggctaattttttctatttttagtagagacacggtttcactgtgttggccaggctggtctcgaactcctggcctaaaatgatctgcccacctcagcctcccaaagcgctgagattacaagcaggagccaccatgcctggcctcagagatatattgttaatgcgcagacctgtgtgtattttatatatttatacagaaaaggggagtgtgtgtttatataaatgtgggcatcaggatagccattttctagaagaatgcacagaaaactattgaccacagtcaacgctcgggtggagcttaataaggaagttcatttttatcataaactcttttggacactttttttaaccatgtgcataattttgcttgaaatcttggtttgatactccagaatattgatctgggcaaagattttctgtgtaacatctcaaaaatacaggcaaaaaaaaagcaaaaatagacaaatgggattatatcaagctaaaaagcttctgtacagcaaaggaaacaattaacaaagtgaaggaacaagctatagaatggcagaaattatttccaaactatccatctagcaagagattaataactagaatatataaggagttcaaacaactcaatagtaaagaaaaaaaacaacaacaaatcatataatttaaaaacggacaaaagatctgagtagacatttctcaaaagatgacatacaaatggccaacaggtagatggaaaaaatgctccatgtcactaatcgtcataagacatgcaaattaaaaccacaaggagatatcatctaacccagttaaaatgtcttttgtcaaaaagacaggcaataatagatggtggtgaggatatggagaaaggggaactctcacacactgttggtgggaatataaattagtacagccactgcagagaacagcatggaggttcctcaaaaaaactaaaactagaactaccatataacccagaaatttcactactgcctatatatccaaaagaaagaaaatcaatatattgaaaaggtgcctgcactcccatgttaattgcaacaccattcacaatagccaaaatatggaatcaagctaagtgcccatcagtgaatgaatgggtaaagaaaatgtggcatatctacacaatggaatactattcagccataaaaaggctgaaattttgttctttgcagcaacatggatggaactgaaggtcattgtggtaagaaaaataagccaagcacagaaagacaaatattgcatggtgtcactcatatgcaggagatgaaaaaaatggatcttatgaaaatagaaagtagattggtagagggaaaggggggataaggagaagttgattaataggtgcaaatgtatggtttgatagatgaaataaaaactgttcaagctgggcaaggtggctcacgcctgtaatcgtagcactttgagaggcttaggtaggcagatcacctgaggtcaggagttcgagaccagcctgaccaacatagtgaaaccctgtctctactaaaaatacaaaaattagccgggcatggtggtggcacatgcctgtagtcccagctactcaggaggttgaggcatgagaatcacttgaacctgggaagcagaagttgcagtgagctgagatcgcgccaatggacgtcagtctgggcaacaagagtaaaactccgtctcaaaaaaaaacaaaaaacaaaacagtactcaatggatcagtggggtgactatagtttgatagtttgctggtcctctccagtacaccctccacagtagccctagaaagatcttcctggtaccagatctgacctttccctcccctcctcaaacgcatcccttggctccccattgcccttgggtaaaagccaaagtcattaacattttccccaaggcttccatagccagcccctgctgccatctccagtttcatcatctcattatgaccgaatctctccctctctctctccttcgccttctctctgctcctttctctcaacccaggagatcttactgagctagagccactgttccccaactgcacccaaatatctactgaccatcattcagggtctcaactgagacactttctatacccccgagtcatgcttctcttactgtaaaacccatccctgcccatatgggctgggagtgtcctgaccagggactgctcccatgtgggcgggaagcacctggaaaataggtccctgggttgtgtccttcccaaaatctccagagcacagacaggtaatgtgaaaagaactgggggtgggaatacagtgtgggaatgtttgctgaatgaggaccgggtggatgaacaatccaggtgttctggacaataaatgaatgatttttactctgaggtctccatcatgaatccctggactggacataagtatgggaattagagaacagaagagcaaccattaaggaagtgaaaatgttcgaaaaaatatttcctggagaaaaggaagggtgtggcattcatttgcagaacgtgtgctgagtggcctcatctcctctcacttattgtcactaattctctcagcagtccagtctttcctttttaattttctttcccttattccttcaaatatttatttctctccttttatattttaatctatatctaatatacttgttatctacatgttgcatctctctctctctctctctctctctctctctctctcttattttattttatttatttatttatttattttgagacggagtctcactctgtcgcccaggctggagtgcagtgacgtgatctcggctcactgcaacctccaccccctgggttcgagcgattctcccgcctcagcctcctgagtagctgggattacaggcacctgccaccacgcccggctaaattttttgtagtttcagtagagatgggatttcactatcttggccaggctggtcttgaactcccaacctcatgacccacctgcctcaggctcccaaagtgctgggattacaggcgtgagccaccgcgcccagctgcatctctatttctatttatttcaatagtttggggggtacaggtggtacatggataagttctttagtggtgatttctgaggttttagtgcactcattacccaagcagcatacactgtacctaatatgtaatcatttctccctaaccccctctcatccttgtcattgaatcccctaagtccattatatcatccttatgccggtcagtagcataaattgaacccaatatgtagttttttgtccctcaccccctcccaccttccctcttctgagtctccagtgcccattaaaccactctgtatgcctttacatacccatagcttagctcccacttataagtgagaacatatgatatgtggttttccatccctgagttgcttcacttagaataatggcctccagctccagccaagttgctgcaaagctgtatttcattctgtttgatggctgagtggtactccatggtgtacatataccacattttctatatccactcattggttgatgggcacttaggttggtttcatatttttgcaaatacaaattgcgctgctaaaaacatgtatgtacatgtgtctttttcatatatgacttctttctggggggtagatacccagtagagggattgctggatcaagtggtagttatacttttagttctttaaggaatagtagcccaggtctttctgtcctagcagcctgcaatctttcccctgttagccaggctggccctgcctgtggtcctctgcttctattcccagtaagcaaaagtggcagaattgacaaaacaacttccccacttcccacttggggagcagagccaatgagagggcctcaggaactggccagaagaacctgcactcatcattcaatctctttaggctcgtgatccttcagaagcttttgcacctcctgccagcagtgctcctggtattctgggtgccttgcaaggtagtataggacccaggagaggccactggccgtggtgttatgacctgaggggcagcaagacaggcttgagtctctgggctgcttcagtaccagagggtggacagcgtccatgcatctaggttctcaggaggatggtggggttggggggaggatgggctgaatggagtgatgcagggttcatctcccacatccctgggatggagaggcctctgtccctactgtagtcccacactgggacactcatcctcaaacatgaaggtgtcagcttctgctcttatttcctcatcagacaactccttccaatcttcatcctggtgagaaggcaagacacacacacacacacacacacacacatacagatcacactagctctgagggatcctcagtttaaagtcagacaatctctgaagacccctccttccagaatcccaagcccaccctgcatgcctagatgtctcttgatcaccatcacgagagcccccaactcacaggcttcctccctggcctccttgtctcttcttttgtccctagtgggaggactcaatgacctatgaatattttcatatttctgcatgatgagaactttctgagaaaaagttcctggcaacctgggttacaggataattggcaatttgctttgcaagttagagattaagtattgctccaaaaatatttgctcacattctagagtgccaaatccatagactcttatcttatgtcccctggagatatttgggttgtaagtctacagactatggcatctcactaaagaggatttgtttatgctccagaacaaaatactttctcctccctgcatcccccacctgtctgtctctttctctctccctctctctttctctctcactagagcaaagaaatagaagatatgccaagactcataatgtagggcacctctcctagggtgcaaactccgttgcacataaaggtaaaaacattgcattctccttggaggaatttgatttgggaatggagagccagtgccacaatcctactctggctgctagtattgctgtgagcaataaatgggctgctctgatccaggtgtttaatgcatctgtcacaatagacatatacatagaaaggcataggcatagacacagacacatagacaaagacaagggcatggatatagatatagacaaagacataggcatggatatagatactgacaaagacatcggcatagagaaatatgtagacatagaaatagacaaaggcagacatagagaataacatagacatagacataaaaaagacataggcatagagaaagacatagacagacaatgacgaatacacagatgtaaacaaagacatcaacatagacatagtcatagacagacatagacaaagagaaagacacagatatagaaacagacacaggcacacaaatacacatagacatagacaaagactcagacacagaaaaaggcaaaaagatagagatagacacagatatacacatagatatttgcatgaacaaagctataaacatagacagagatgtaaacaaaagcatagacacagaaaagacacaaagacatagacaaatacagaccaagacaaagacatagaaaaagacacaatacagaccaagacaaagacatagaaaagacacaaagacatagacatagacataaaaaagacacaggcaaagatatagacataaacacacataaagatatagacataaacacacaaaaaggcaaagatgcagacatgggcaaagacaaagacatagtcatacagacacatagtcatactcagacacagactcagacatagacaatgacatatacaggacatagacatagatatagatgtagatgtatagataaaaatgtgacacactggcttattaatttgtaaatagagtaaaatatcagacttgtcagtttcacacctagaggtcccctgctatttgtgtctcactcagtcatctctaaaaactatctctgacctgtccctcccctgctcaagcaatttccaatgctccccagtgccctctggatcacatccaagttctttgatctgacatttgacatgaagctcccttctactttttgcattcagatcccagagaaccccaccttgctcagcaggagtacatcagtgaagtccaaagtcttggacttggcctttacttcgtggaaataatcaacaccctggctagtaagggtgtggcgctgctcctggatgatagcttctgtgaagtcatgaaccaggcagcaggccctgcggaagcgccatccgctggggatgagataatacagaaagtccatgcacagatgaaggtaaggaagttgttgagaactggaataaaggtgattcttgctatgctttagcaaagagattgacagcactttgcttctgccctgccctgccaccagggaactgagctccaagatggtggcaatatattgactgggctttctgcaggataagggcagaaagggaggcaacaacttaacacacctgaagccacaggagcatctcccaccagcatccaggagctacctcctataggaagcacagtatccaaaaacagatgcccccacagttacagagtgaggatcacccatgagattcactctccaaactctcttatctccctgatttccatctctaggagcttcctccatgcccctgggcactcagaccacaacttgaacatcatgctcttattcgctctcccctgcccccattatagagttctgtcccttctccttcctgaaactatccacaaagctcagaattcctgctcttccagctggtccgaagtccatgccccaccctagtatccttgcatccaatgtcaactccatgcaacatctacattacagttattcccccacagagctcagctctgaccatgcccatcagctcaaaccccttcaagggctccctagaaacctcatgataacatttataccagtcatttagactatgacataactcctccaggcacttctggttgtcccgatgaggtaggcacttctggttgccggaccccaacctacttctttggattcatggctcaagttctcagtccctgggcaaagactcactcctgacaatggctgtcaaagctgaagacacatttctgcacactgtccaaggtcatgaggctggtgtgctcaaacatgtccagatgggcactgccccctgaggccaggagctgccacttggcctagccagagaaggggacacagctggggctggtccctagctcctttgagtccttccccaagcccaaccatcaagatggacttccccaaagccaacctctttgtcttctccccaggaacccctccccaaggaggaccaggttgtgctgggaacaacaactgttactattaagagacaaagacccaagacgggggttcaggagaacttggattcatgttccacccttgcatgcccttggtcaatgcattaacctcccttcccctgtcaaatcttcaggaacagttgagatgatgtaccttggtgccacataaacaaggttagaaatcctgctccactattccaacctcgattattagctaggtaaacttgggcaagctccctaatctcttagacccactgtttcatcatctacactgaggcagaaataatctctcattcacagagttgttaaaagtaaattagtcaatatatacttgttatcaatgagtgggaacatggcattgtttctggccaatagggggcatactcaacaaatgttggatttcctcacctgcattgttataaattgattacaagaatttattacactatccctatgttgggagaggtagtcctccatgtgccctgagtatcctttctgggtatgccaagaatgtaagacactgatattcttaactggagccatttctgagagttgtgtttgcagagaacagccttgagggatgaggtaatgactcccttttgacacttatcaggcttgctataaaagcagatctcctaagcctactgctccatccctgtaatgcaatatactatgtcagcaagcatcagtagaagcccacctgtgttgccccatgggatttgggtggcttggagaaaaaagcaaaccaacaagaaacacatgctccttgctgtgctatgagtaataaatcatgctttgtctcttacccacaaatctctgtcttctggcagaatccatgaaaccataacaagataacttatcaatttgcaatttttaaaaaaattctagagatgtcacgaagcccttgcccaaattcttcatttgccccccatatccataccctttgaaatgtgattttttcagtgacttccattaagagaccgagcattttttactacccaccactttttgattctctgttggacttttggctttctctgacaaaacacaatgtgaaattgatgaggtaataactaatgaatctaacctgcctcgtctcactccctggaaccctctctgccatgtgaaccatggggtgccttctggagggatagaatccctggaggaaagtccaggagtcccagctgaggacatctgtgtcaatttgaaaccagacaaaacccaaacgtttgagagaactgagccaagaccagcaaggctgcctacctgacccacagcttctcatgtgccatgaatatctcttgcacatccagaagaacccactgatatggtttggctgtgtccccacccaaacttgaattatagttcccataatccctatttgtcttgggagacacctggtgggaggcaatttaatcctggtggtgattaccttcatggtgttctcatggtagtgagggagttcttacaagatctgatggttttataaagggcttttcccccttttgctcagcccttcctcttgctgctgccatgtgaagaaggacgtgtttgcttccccttccaccatgattgtaagtttcctgaggcctttccagccctgcagaactgtgagtcaattgaacctctttcttttataaattacctagtcttggatatgtctttattagcagcatgagaatggactaatatagtaaattggtagagtgaggtgctgctgttaacatacccaaaaatgtggaagtgactttgaaactgggtaacaggcagaggttggaacagtttggagggctcagaagacaggaaaatgtggaaaagtttggaacttcctagagacttgttgaatggctttgaccaaaatgctgatagtgatatggacaatgaagtccaggctaaggtggtctcagatggaggtgaggaagttgttgagaactggaataaaggtgattcttgctatgctttagcaaagagattgacagcactttgcttctgccctagagatctgtgaaactttgaacttgagaaagatgatttagggtatctggcagaagaaatttctaagcatcaaagcattcaagaggaagcagagaaaaaaagtttgaaaaattttcagcctgatgatgcaatagaaaagaaaaacccattttctggggagaaattcgagcctgctgcagaaattcacagaagtaacaaggagccaaatgttaatcaccaagacaatggggaaaattactccagggcatgtcagagaccttagtggcagcccctcccatcacaggcccagagtcctaggaggaaaaaatggttacttgggccaggcccagggcccctttgctgtgtgcaacctaaggacttggtgtcctgcatcccagctgctccagccatggcaagtggccaaggtacatgacttcagcggatgcaagtcccaagctttggcagcttccacgtggcgttgagcctgtgggtgcacagaagtcaagaattgaggtttaggaacctcggcctagatttcagaggatgtacggaaatgcctgatattcaggcagaagtttgctgcaagcgtgaggccctcatggagaacctctggtagggctatatggaagggaaacgtggggtgcaagcccccacacgtagtccctattggggcactgcctagtggagctgtgagaagagggccactcaatatcccaaaatggtagatccactgacagcttgcactgtgcacctggaaaagcaactgacactcaacaccagcttgtgaaagcagctagaagggggcttgtaccctgcaaagccacaggagtggagctgcccaaggtcatgggagcccacctcttgtatcagcatgaactgaatgtgagacatggagtcgaaggagttcattttggaactttaaggtttaatgactcccctactgcattttggacttacatggggctagtagcccttttgttttggacaagttctcccatttggaatggtgtatttaccaaatgtctgtacccccattgtatctaggaagtaactaacttgtttttgattctacaggctcataggaggaaaggaattgcctcatctcagatgaaactttacactgtggacttttgagttaatgctgagatgaattaagactttgagggactgtttggaaggtgtgattggtgttgaagtgtgaggacatgagatttaggagggggcagggatagaagatgtggtttggctgtgtccccacccaaatctcatattcatttgtagctcccataattcccaagtgtcatggaagggaccaagtggaagataattgaatcatgggggtgagtatttcccatgatgttctcatgatagtgaataagcctctcaagatctgatggttttataaagggggagttcccctgcatacactctcttgcctgccaccatgtaagacatgactttgcttctcattcaccttccaccatgatagtgaggcctccccatccatgtggaactgtgagtcaattaaacctctttcctttttaaagtactcagtctcaggtatgtctttatcagcagcatgagaacagactaatataccagccacctgtctcatagacttgttagcaatcataaaaccttattgttttaaaccaatgagttctcaagttgtttcttactcagcaacagctactatacaattgtcatcatgaccctcttgagtttacaagaggaaatatagaaacagacactttctgggcacctactatgcaccagggatatgactccattacatcaccttgaccatcttttaagtagggattattatacccattttacagctgaggaaaccaaagctcagagaggaaaagcaatgctgaatgccacccagcagagccaaaattccagaccagatctgtctgtggtgcctccaccccaaggcttcagctggaactctgggttcaaagaattcacgtgcatgatattcacactgtcagtgaaaaacttcatatagggcttcagcatgttgaaatggaaggcgggcatcagcatctgacggtggcagctccacttgtcactggcatttaccaggagcccatcccctagtagaggcagtcaagggccatgggcaagggtatctccctcttcttacccatcccccaaggtttttcccacccttgttcacctacaggtactcacccagccagggcttcaggaacttgtagaaggcctcgtcttttggtgcaatggtggctgacatgaatgaggaccatcagaaaccatggaaagggtgagggagggactttgggtgtggggtgaggctccaagccagagaccacacttactccctcaaagcgcagcatagtagaaacatgtgacatggccccgatatgtgttaacatgtcctgacatggtcacaaaatacacaacaagccctagcatgctatgctgtgctctaacaaggatcttagacactctgaaatgaccttagcatgccctataggcaggccccagttaggattcagatttaaatatggtccctttaatatcccagaaatagcccatgtctggtcccaaatgttccatagtcatgactcaaatataccctgaagcctgtctcaaacaatactcaaacaatgtctcagaatgtttacacacagaccctgggttccagacatgaggcacatccctgggatcatatggagatggttatgtctagggctcagctgtggccaagagtatttggggtatgtggggtttgtctgcgattctgtttgagatagtctttttcttctgctggtgacgtctgggccatgtttgggatgcgcctcacgtttgggcaagggtagggctccaggctcgggtggcgtctcctactggagattcctagggcctggagcaggagggcaatgagcatatagtggaagaaccacaggatggggtagaaggaaccgacccacagaggtgaatgtcatgaaaatagcagtccagatcctccaccaactgcatgtcctcctcattgttctgggcttggggacatgcaaggtgatgccaggcctggcaggaggtcttgaattctaatgttgcccattgcatcgcttcatcccccactttaaaacattcctactcattgttagaaacccagctccagcaacttctcttccaggaagccttccagcctgccccaggagagaccaggttctcctctgggctctcccagcccatctccttctggaccactcctgaccccatgactttggggatgtctctgcccagatccatctcctcaagcttgggagatccttccaggacagagccttgggttgaggcctcatggggctccagtagtgcacagaacgccggggtggtggggggatggcagtagtgggaggagacgctgagatgggggttggtgaatacatgaaggaaagagaagatggctgagggtgaagcaagaaggaagggcctggatactgcagcggccacacagaagcttgggggaggaggggcttgcaggcctcagatgcaccacggcattcaccaccaggtgtttcagatggtacctgaggcattgatgacagaccagatgatgttggggtggcacaacctgatgatgggagtaatggggttcatccagatcttaaagccctgggggtaagtggccaccagctgagtcagaactctcatgccctccttcatgtggggacctgcaagcaaggcaggggcctgtaatcccagctactcgggatgctgagacacaagaatctcttgaacccaggaggcggaggttgcagtgagccgagatcacgctactgcactccagcctgggcaacacagcaagactccgtctcaaaaaaaaaaaaaaaagaaaagaaaaggaggccatcctagcaccatgcatggagtccagttctttggataagtatgccactgggcaatgttatgaccctataacttgagtcagaactcctatagccatttctttttgttcatgaacatatagaaagaaaggcttagttatgtctggtagtcctaaagctggggcccaagttaaagcttccttgatctgttcaaatgctatttcttgattagtcttcgaaaggaggggctgtttttctcctatctttgtggcttcatataatggtttagccattaatgaaaaatttggaatccaaatatggcaaaatcctgctgcctctaaaaattatcgtatttgacaccgggtggttggggttgggagtgcacaaatggcctgcttctgtttatagccaagctggtgttctctgtggcttactatgaaacttagatatttaactttttcatggcaaatttgggctttctttttagatactttgtaacttgttttccataaaagatggaggaggtcctgggttccttggtaataatcctctcgggttggggctgccaaaagaaggtcgtccacgtactgaaacaaggcacagttatcatttggcagggtataggccttgaggtttgaggccagtgcttcctcaaagattgtaagagagtttttgaacccttgtgggagcttagtccaggtgagctgtgtagcttccttgtcctattgaaatgcaaaaatgggctgactaactggtgccagtcagatacagaagaaggcatcttttaagtctaagaccgtaaaccaagtggcaacttgctggaataagtcccattaaagtatataggtttggtactactaggtggatagccactgtggccctgtttctagcccgcaagtcttgcactggtctatacacattagaccctggtcctggtgtcggctttcatgctggcaaaagtggagtattccggggagactggcatcggactaagatcctgtgtttatagagccagtctaaatgcttacaaatgcctcaaatagcctctcaggggaccgggtactgacgaactcgaaccagagttgctcctggtttcagtttaactactactggtggatgatttacagccagcctaggtgggttatcttcagcctataccttaggaattttattaactagtccaaataataatttttcttctttccgtgtatgaagctgcactggcgcctgcagtttctttctatgaagtctccattcctcagcctgtggaatggtaagggttaacactatggcttttgggtgagtcagattgaaagtcatatctttttgaagcctaaaagtaatctgtgcctgcagtttttgaagtaggtctcttcttaacaagggaactggacaagttgggaggtataggaattcatgctagacttctcgtcttcctataacacacctccttgactgactaaatggcctcttctctgagactccagcagctcctgcaatagttgtatagttcttggatagtggccctatgggtcaagttactacagagtgttcagcctcagcatctacaataaagttcatcaattggcctccaacttttaatgtgaccacaggcccctggaggcctaatgagaaggagcctggtctgtcctaatcctcacatccttcagctcctgtcagcccaatcaggtcagtatctggttcctctaaggcaccgcagcccttggccgatggcctctttgtctcacggccttggccatttctttcattgccttctggacattcatccttttagtgtcctttctttttgcatctctcatattgatccctctctagctttcaaatttggtcggctttcaaatctttgtctaacttaacctcttccatgtccacgtccacgtccgtgtcctctcacattgctaatctctttttctataaggcctgctgccaacagatctgccttttttttaagccttcaatctgcttccttgttttcctcctggtcatagttaacatacactttggtggctacttctataagctgggtggcgttcacgcctgcaaaaccttctaactgatgaagctttcatttgatgttaccatgggcctgtcctacaaatgatgtattcaccatacgctgattttcagtggcctcagggtcaaacagggtgaaaagttggtatgcctcacagagtctctcataaaactgacttgggctctcatcagctccctgaagcacttctgaaatcttccctgtattaattgctttctttccaccctcccttagcccttgcagaagtgcctcttggtacctctgcaaacgctgaagctgagttgcatcctctgggtcccagttgggatcttggtctgggagctggccctgagcatatgcctgagcgttcactgcatctgctggtgcaggggcttctagtcagtggagagctccctgtgttactcttctgtgctcctcagtgttaaacagcgtgagaagaagctgcctacagtctggccaggttggattgtgtgtcagaaagatggattgcatcagatctatgagagcttggggcttctctgtgtagggggggtatggtgtttccagtttaagagatcagtggttgaaaagggctggtagatgcaagttcattgccccccgccggacttggacttggtcattataataaatgggtcctcgcgtctccctgagaggcatttgcatagctcgagcatggccagatttgagttggtctgcttgactatcttgacttccttccctggccccccgaggctccgatccttcccttcagggtgagacttggggcatgctgtcttttgagtctggctcctggggagctggagctatcagcccctgtaaagcgaggtaggctgggacatatggaggaagaatctctgttccctctggtggcccctgcaaaactggcctctcttgctctctctgggactttccctttaactctgtgtctgccagtgaagctgctcttactttcacttttgggttggctcaggctacaagtgttttgcaataaggtgctaaacggggctggatccaggctggtcttgtctgtgctatatttaaccatgaatcaatacaaggaaattggtctggatgccctggctgtcctccgacccctgtcaccaccctaaatacacgaccaattatttccttgtctatagttccttcagtcggccatctaacaccaaaagaaggccattctaattctcagagagttctcaacctctggggggttaacttaattccataatcccctgcaaaatctttcttaaagttctgtaacatgcattccaatggagtaagttttgatgactttcctcccattcctccctttacagcgcagcacactcactcttgcacactcactcttcctcttgtttcggctgaatataccatctcctattacaggagttttcagatgctgcttggcttcggagagttccttattcctgctacaactgctgcagtcgtagggcagctcctattagccatatgcagatcaccgctagtcttagtcggccccacactttgctcagaacacacagtccaggctaagagatctgtgactccccactttgcaactgatgaacctaattaggcccctccattcacacactttcacacacttccccactcccagttcccatgttcttaattggggtggtgagccactctcactacctccagtttccttttcctaaccaacttagtgagccactcttgcatcctatgtcagttggggtgtaagtttcatctgaattggcgagccattctcaccacccccagcccttctgggttggattaatagtcacatcccaggaggtgatcaggctccccttccatccttatggggtgggtcctgccttgggccccaaaaccttactgcagtcctgaaggaagcacgctgctcctggaatcatcccatagcccctcaggttccactgtgctgctgggtaggggcaccaggtcatgagagacccgatctcccctccgggctgaagttctctgggcagtgcctggggtcacaggtctcccctggcccagggctcctccagcccccacaggcaaaggagacagtaagcctgttgtctccactcctggctggctcttcagaaatgttgtgggaaactgaggaacagagaccgatatgggagaacaggaggatatttattttaaggtatgcaccagttcagtggattcacatccaaaaagctgagcgttggacaaaaacaaaagttaacttatataggctagcatacaagagcaaaacaaagacaataaattttacagtgacaagccacataatctatagtgtaactgctaacttggcataacttgtggccttgtatatgcagcgcatcagaaaaaaattaaaacaggaactttgcaaatcttactaaatacaagcattggcaaacatagtcataactaatagttcagtacaggagagacattgaaggaatttgttgttcttttaacctttctcaggagtgtctgcagctcatttctgcaggccaggtcgccatgacctgtctatagccttgcctgcagcagaggaaaacttgtgtttttcaaataacccttatttcttctggagtgaataaatgcagtgtttatttttctttaatttctgccttaacactgcccaaagcaatttatagattcaatgctattcctattaaactaccagtgagattatttacagaactagaaaaaaaacagttttaaaattcctatagaaccaaaagtgagcttgaatagctaaggcagtcctaagcaaaaaaggtaaagctagagacatcatgttacctgacttcaaactgtactacagggctacagtagccaaaacagcatggtactggtacaaaaacagacacatagaccaatggaacagaatagagagcccagaaataaggctgcacacctacaaccatctgatctttgacaaatctgacacacaaaaaaactaacaatggaaaaaggattccctattcagtagatggtgctgggataactggctagccatacgcagaagattgaaactgaatcccttccttataccacatacaaaagttaactcaaaatggattaaagacttaaatgaaaaacccaaaactatgaaaactctggaagacaacctaggcaataccattcaggacatagacatggtcaaatatttcatgacaaagaagccaaaagcaactgcaacaaaagcaaaaattgacacatgggatctaattaaactaaaaagcttttaaacagcaaaggaaactatcaacagagtgaacagacaacctacagaatgggaaaaaattttgctaactgtgcatctgacaaaggtctaatatctagaatctataagaaacttaaacaaatgtacaacagaaaaataaacaactccattaaaaagtgggcaaaggacatgaacagacacttttcaaaagcaggcatacatgcagccaacaagcatataatagaaagctcaacatcgctgatcattagagaaatgcttatcaaaaccacaatgagataccgtctaacaccaatcagaatggctgttaaaaacgtcaaaaaaaaaaaaaaacatgctgatgaggttgcagagaaaaaggtacactgatacgttgttgttgggagtgtaaattagctcaatcagtgtggaaagcagtgtggttatccctcaaggagctaaaaacagaaccaccatttgacccagcaatcccattactgggtatatacccaaaggaatagaaattgttctatttttaaaagacacatgcacacctctgttcactgcaacactattcacaatagcaaagatatggaatcaacctaaatgcccgtcaatgatacactggataaagaaactgtagtacatatacaccatggaatactatgcagccataaaaaagaacgagattatgtcctttacaggtgtgagccaccgtgcccagcctaaccaaaggctcttttctgagccatcattttccctggcaggcagtggaactgagcagatgggccagtggccatagtgctgctgccttgtgtgggacccaccaattggactggcagaccagtgggttactggtccccatgcaggcccctcgcaccatgacagccgagcccacccaagctgagggatgctggagagatatccattcaccctggccaggcacattggctcacgcctgtaatcccagcactttggaaggccaaggcaggtggatcaccagaggtcaggagtttgagaccagcctggccaacatggtgaaaccccgtctctactgaaaatagaaaaatttgctggttgtggtggtgggtgcctataatcccagctactcaagaggctgaggcagtagaattgcttgaacccgggaggcggaggttgcagtgagccgagattgcaccactgcactccagcctgggcaacaagagcgaaactccatcttgaaaaaaaaaaaaaaaagatattcattcacccacccaggcagagcagtcaataccatttctcctctggtggatgagggatgtcccttctgccctcacccccgcagtcttgggagaactataggataacataagagcctttggccaggtgatcccccagtagtagctcgttatatgagtgccccaaagcacgtccttgtcaccccttcctgcagtcctttcccttctgactccattttatgtctccgccagtcattttattttcagccctaaaatatgtgcagtgttacatttgcttttaactttctgttaactctccatgggcaattgactactgtgggacacttggttgtgagcggtcttccgttgtgttgactctgggacatcagaaccagagttgttctgtgtccccaacttgggttcacttttggccacccctggggtgccccagggtttttggcattggtgaggggaccctcgttgactgaaacttgggcacttctgagtcttcagctttgttatgttggccaccccctggatgctctggggttttcaacattgacattccctgtaggattatggattatagccctccctctaagggaacattggtcatgtctttttctgccctaaagttagtaccatcttcctggccaagcacagtgactctctcctgtaatcccagcactttgcgaggccaagatgggtagattgcttgaggtcaggcgttcaagaccagcctggccaacatagtgaaaccccatctctactaaaaatacaaaatttagccaggcgtggtggcaggcgcctgtaatcccagctatttgggaggctaaggcacgaggatcgcttaaacccgggaggcagaggttgcaatgagtcaagattgtgccactgcactccagcctgggggacagagcgagactctgcctcaaaaaaaaaaaaaaaaaaaaaaaaagaagcactattttcctaatagccagttgctagccctttcctgtgtactgtcttaccaattgccttgctcgagcccctcttggtcaaaggaattgggagttcccaggcccctggcctgacagacagccacctacagcaatagacaagtggccacattaattttttttttttttttggcgtcttcactactacgtaagttctctggcaagtcaaggaccgtaaggtctccctttgtgcaatgtttacccttcccttcctcgcttacacagtcactatttggttggcccccctctctgggtaatgctcattttctgtggaatttaggcttaacatccaactgcccatttgaagctcataatccacttttgtaacattttgctatctatataaagtgggaaattaaatgggataagtgggctgggtatggtggctcacacctgtaatcccaacacttggggaggccaaggcaggtggatcacttgagcccaggagttcgagaccagcctgggcaacatagtgagaccctgtctctacaaaaagtacaaaaatgagccaggtacgatggcgcacgccggtagtcccagctacttgggaggctgaggcaggagaattgcttgagcctgggaggcagaggttgcagtaagctaagatcaagccactgcactccagcctgggggacagagtaagaccctgtctcaaaaaaaaaaaaaaaggaaaagaagtaaaagggaaaagtgaaaaggcatttgctaaacttaggctaactgaaaccccttgtagtgatctttactaaacataaggacatcaccaagcatcccaaggaacttgccactaggatgtctttcaggcaattggaataagttcaaattattgggcaagttgaaaaagaaaaaaatcatttactattgcaatatgtttgggttcaattcaagttggcaaaccaacagatttggcctaggcatggttctttacattataatggttgtataattagatttgttgtttcgcttttttgtttttgagatggagtctagctctgtcgcccaggctggagtgcaggagcgcgatctcagctcactgcagcctctgcctcccgggttcaagtgattctcctgcctcagtctcccaagtagctgggattacaggcgtgcagcaccacacccagctaatttttgtatttttattagagatgggatttcaccacgttggccaggctggtctccaactcctgacctcaagtgatccgcctgctttggtctcccaaagtgctgggattacaggcatgagccaccatgccgggctaaattcccctttatatatacatctatcctattagttctgtccctctagagaaccctgataatacaccaggccataccatttatcatgtgggaggggatgtggttccagatctagaccccagtaggattatcagagaaaatctcaagatctcaaacacagaaaccatatgctaatttgtttaatacatggtaggaaaaagtgtgcagttaagccagttttttatgataagatgggagaaataactcaggagaaagttgaaaatcccgttctatttcagggctgtttcattgaggcactcaggaaatatactataagatctacttctgtttggatctcttatgtctatatgttaatatgtgtcatgtggaaatacgatttcactatcaatcatataaaagagctctcattagttggtttaaagaaaggttggttcaagccgggtgcggtggctcatgcctgtaatcccagcacttgggaggccaagcgggtggatcacgaggtcaagaaatcgagagcatcctggccaacatggtgaaaccctgtctctactaaaaatacaaaaattagctgggcatggtggtgcgtgcctgtcatcccagctactcgggaggctgaggcaggagagtcacttgaccccgggaggcagaggttgcagtgagccgagatcgcaccactgcactccagcctgggtgacagagtgagactccatctcaaaaaaaaaaaaaaaggtggttctttaagcaaggctgggttaagaataaataaataataaaaattttaaagtaaacaagaaaaaaaaagttggctgtacatggtggctcacgcctgtaatcccagcactttgagaggctgaggcagaaggatggcttgagcccaggagtttgagacgagcctgggcaacatggcaagactctgtctctacaaaaaaaaaaaaaaagaagaaaagctggctgagcatggtggctcatacttgtaatctcagcattttgggagaccaaagtgggaagatggcttgaactcagatggtcaaggctgcagtaagccatgatcacaccattgcactccagcttaggtgacagagtgagaccttgtctcaaaaaaaaaaaaaaatagaaaagtaaatgtttatcagactagtaaaagctagctcagaggctttccagttcacacgactttagtaatctttggtaagattaacttggtaaatttagtctcaaaattattttgaggaatttaaaatctttaaatcatgttatgttaagtaatcctagggttttcgctgggaattagggttctaagagttagaatagtaggagagtaagatgtgtttttggtgacgtttataaaaaacatgacgatgtcttttttgcttaagaaaatacaattttttctaatttaaaggacctttctactggcattgagattaaaaccactgtatctaaccatttgcgtgtgtgtgtgaagtggtaagtttctatttgatattaatggctagagttctaaagtaaaagctatatgatcttttttttttttttgcgtctcactccagcccaggctggagtgcaatggcgcgatctcggctcactgcaacctctgcctcccaggttcaagcgattctcttgcctcagcctcctgggtaggtgggattacaggcgcccaccaccaagcccagctaattttttttttttgtatttttagtagagatggggtttcaccatgttggccaggctcgtcgcaaactcctgacctcaagtgatctgcctccctcagcctcccagactgttgggattacaggcatgagccgctgcgtccagtctataatatctttatttgtgtacgtgtgtgtgtgcacacacacgcactcatgtttagatgtgtttatgtgtatttacacgtgttttgctattgtggccacaagataccaatttggctttaaaataaaagaatacctataaattaagtaaataaacccaaatacttttccagttcatgtgacttaagtaaatctttaataaataagctggatttaaaattactggtaaaataaaattagaaatgtcttcagaattgtcaacataagttattgtttagatgtattggtcaagcagttttatatttatctctgctaaatatcataagatgtcaagatttggcgtgagggttatcaagctataaatgcagcccagaagagaattatcttggccgagtgcaggggctcacgccgctaatcccaacactttgggaggccaaggcaggcagatcatctgaggtcaggagttcaagaccagtctggctaacatggcaaaacccacctctactaaaaatataaaaaaaaattagctgggcatggtagtgggcacctgtaatcccagctactctggaggctgaagccggagaatcacttgaacctgggagacggaggtttcagtgagccaagatcacacccctgcactccaatctgggcgacacagcgagacccgtctcaaaaataaaaaaataaataaaatgcactaacacaccaacctgggcaaagtggcaaaatcctgtctctacaaaaaatacaaaacttagccaagcttggtggtgcacacctgtagtcccagctactcaggagactgaggtaggaggatcacttgagcccaggagttagaagctgcagtgagctgagttggcaccactgcactctagactggggaacagagactgtttctcaaaaaaaaaaaaaaaaaaaccctaaagaattggttagaacgagtaaattttcttacagtattgatttactcttaataaaattataaaaagttttaatttttaacccaaaagttcaacttttattgcatctcttgctgtattcagctttctctccccttcaagaagttctgagatagtaactgtctctttcaacttttcatcggcctctgtaactgtttttcatcacattctaactgatgtggcctgatgtcagaaatgttttgtcttaaagtctaaaggaaatgttttcatctaatataacattcttgtgctcttggctttaaattcgtctatgaaattaaaaactcacttatgactcgggacacactctgtgtctaaatcagtacaattttcattagatttgacttgcagcttatctaaatggactccccatggagaaaagcaatcacactgcagacggtcttttttttttttttttttttttttttttgagatggagtcttgctctgtcgcccaggctggagtgcagtggcgtgatctcagctcactgcaagccctgcctcccgggttcacgccattatcctgtctcagcctctcgagtagctgggactacaggcgcccgccatctcaccccgctaatttttttgtatttttagtagagacggggtttcaccgtgttagtcaggatggtctcgatctcctgacctcgtgatccacctacctcggcctcccaaagtgctgggattacaggcatgagccactgcgcccggccaaaaggtctttttttttttttttttgccttttggtaactgatgtaacaagcaaatgtttcatcttatcaaaataattcctatgttattgttattattgattttcctaagaaaactgagattgtaaaaaattaagattatgacattaatgtaactttcggcattacttttaaagtccttgtgctcttaagttacaggactttgactcctgggtctaaaaaggacaccaagacctgcaaaattttaaacactgacagcagttaaagcctcatttttggaccctagagaagattacaatcaaaataaactgtgttcgtgagacacaaggccagaaattaaaactattattattgaacccctctagacccagggactatcatggaaaaggtgagcatgcaagattgtaagggccaattttgagagatgaaattagttcagagtttctctataacttaaacattaatgttaaaggcacactgaagcaagaccagcatctggcttatataaattatatcttatggtcaagatgattgaagcttgtttataagattgagaaactggccccataccttgtcccttattagggcttattatttaggaaagtaagtctcctctctcaaaaaataataatttaaggtctttgcatttttttgaagtgtctgagttactactttggctaaatgaatgactttagacaatcacctatgatcctattttgtgatattaagtgtcatagactttcgatatttgactaactttccaaaatcaacttctaaattcagtctttgtgacctcattattttttatattagatctcctgaagtccatgagagacatatttgactaatttagtacaataaaatcatactacatgaagtagcgctgtcagtttgggagtgaatgaagggggacggatgcagaaataaagacaaagacaaaaagatctgttttgaaagaaggatcagggggctcctcgcttctagtgagcaaaggccctgagcttctacagcccttcgtatttaatagatggaaagagcaggaagggagaggtaatggttggtcagctgcttgatttatcacagggacacgtatatctataacagccacaggtgcttctgtgacccacattttccctggcgggtcctcacactggctcaataaacttggatgatttgagactttgccttggtcattcacttttgtggtccatgggggcctggtcatcaaaagcccagtcaatgggacatagtcattgcgggccttgtctgtggtgacctggtcagccagagtcttgtcagtgagggggaagcccggtcagcaggatctaagtcagtggggttttgctcggtgaggaattggtcactggggtctgctcagtatgggccttatctgtaaaaatctagtcagtgggccaggcacggtggctcatgcctgtaattccaacactttgggaggccaaggtggatagatcacctgaggtcaggagtttgacaccagtctggccaacatggtgaaaccccacctctactaagaatgcaaaaattagccagttatggtggaatatgcctgtaattccagcactttgggaggccgaggtgggtagatcacctgaggtcaggagtttgacaccagtctggccaacatggtgaaaccccacctctactaagaatacaaaaaatagccaggcgtggtggcatgtgcctgtcgtcccagctactcgggaggctgaggcaggagaatcacttgaacctaatcaggaagtggaggttgcagtgagccaagatcacaccactgtactccaacatgggtgacagaggcagcctccatctcaaaaacaaacaacaaaaaacctagtcagtgggggtgtagggagtggtattttgttcagtaggggcctggtcactgggggtctggtcagcgggatctgaaaagtagagcctcgttagtaggggttgggcggttagcacctggtcagtggaaacctcgtcattgtggtctagtcagctgaggcctggcggtgtggtcctgctcagtcagcgaaggtctcaccattggaagcatgtcagtgtggcctagtcagcagatcccggtccatgggatttggttatttgggacctggtcaatggggacgtgttctgtggggaccatgtcagcagagacctggttgtcaggggtgtggtcagctaatgcggtgccaccgaaggactccccagtggggcctactcagtggggccctggtcagtggaggcctggttgtaaggggcactgttggcagtgaccttgtcattgagctcctggccagttgggaccagtcagtggtttgggtcagtggggcctggtctgtggggccatgtcatgtggtctggtcagtggggccctggcagtgtgggcctggtcatcagaagcctagtcagtgggggggcctactcacgggggtgttggtcagtgaggacatggtcattgtggtcggcttaacgggatccattcaatgagggtcaggtcatggaaaatctggtcagtggggtttgatcagcaggggactgctcagtggggatcggaccagtggggcctggtcagcaggcggccggcagttcctggggcctggtcagtggggtccagcagttgggacctggttgattggagggtccagccctacgggacttagcgggtgttctccccgtgtgcagagacgagagagcgtaagaaataaagacacaagaccaagagataaagagaaaacagctgggcccgagggaccactaccatcaagacgcggagaccagtagtggccctgaatggctgggcacactgatatttattgcatacaagacaaggggcgtagggtcaggagggtgaatcttctaagtgattgacaaggtgaagcaagtcacgtgatcacagcacagggggcccttccctcttaggtagccgaagcagagagagagaaggcagcatacgtcagcgttttcttctatgcacttacaagaaagatcaaagactgtaagactttcactattccttctaccgctatctactacaaatttcaaagaggaaccaggagtacgggaggaacatgaaagtgaccattggagcacagcaccacaaggaggggtttaggcctccggatgactgcggcaggcctagataatatccagccttccacaagaagctggtggagcagtgttccctgactcctccaaggaaaggagactccctttcgcagtctgctaagtaacgggcgccttcccagacactggcgttaccgcttgaccaaggagccctcaagctgcccttatgcacgcgttgacagagggctcacctcttgccttctaggtcacttctaacaatgtcccttcagcacctgaccctctacccgccagttattcctaggttatgttagtaacgcaacaaagagtaatattaaaagctaatgattaataatgtttataataatgattgataattgtccatgatcatctctatatctaatttgtattatgactattcttattctaactattttctttattatactgaaacagtttgtgtcttcagtctctcacctcggcacctgggtaatcctccgcccacagtcaataggggtctgcagctggggcaaggtcagcggggatctgatcagtgagacctagtcaggtctcactgactgactaggccctgggggttggggcctggccagcaagagtccagtagttggggcgtgtttggcgagggtctcatggttggggtctggccagcgggggtcccacagttggggcctggtgagcagagatctggcagttgcagcctcgtccatgggggtctggcagttggggcctggtcagcggggtcttatagttggggcctgtttggagggggtccagcagttggggcctggtcagaggggatacggcagctgggggttatttggcagggatgcagcagctgggacctggtaggtggggtctggcggttggggcctggtcagtgaggatcagatcagtgcggtctaggcagtgaggtctggacgctgggccttcatctgcatgggtctcgcagttgggacctggtcagcaggggtctaccagttggggcctggttggcggaatcaggcagttgggacctggttgtcgggggtccaacagttggggcctggtcaaaggggatccagcagttggaacctggtcagcagggctctggcagttggggcctggtcattggggtctggcagttggggcctggtcaacaggggtccaggagctgaggcctggttggtgggccgtctagcagttgaggcctggtcatctgggcccggcatttggggcctgatcggcggggatcagagcagtgaggcctagtcagtgaggtgtggatgtgggggcctggtaagcaggggcccagcagttggggtctggtcagcaggggtctcataagaagaggcctggttggcaagggtctggcagttggggctcagtcaggaggggtctaggagttggggcccagtcagtggggtctggcagtttgggcttgatcagtgcagtccagcagttgttggggcctggtcagtgggggtccagtagctgggacatggtcagtggagtccagcgtccggggcctggttggcaggggtctgacagttggcgcctggttggtggggatcccatagttggggcctgtcagcagggatccagcatttggggcccagtcagtggggttcagcttttggggcctggtgagtggggttcagcatttggggcctggccagcaggggtccagcagttgttagggcctggtcagcgggggtctgattagtgagatctatttggtggggtccatcagttgggacctagtcagtgagggccgtgagggccttgtcagttgcagccttgttattgtggcctttgtcagtggtgtctgatgagccagggcctggtctgtggggcccagtcagcaggacctggtcagtccacatctggtcagtgggacctggtcattgtgggggtggtcagctaggacctgttcagtgggagcttaaccattggaagcctggccagtgggatcctgggtgatctcaggccacgggttagtcctcgaagcctccgtgattgcctccatccatggggtggggggtgagtcacagcaccccagtgggcttctgggaggaggaggtgagagggtgcattgcattgaatccagccctgccacacagacctggcactttacacactacgcgagtcaccccaagggggaagcctggcttctgccctctgccctctgccctctgccctttgccctatgtccctgccccatctgcatccccaggaccacccagcatggaaagagcagaggctgaggagcacctatgggtgctctgatgctggccacaggcccgggggtgacagtgacagggatccaggtgcacacctgagtggagcagccaggcccagctggaggagagacgtgttcacccacacacatgcatcctcacatacacagacaaattgcacgcatacatgttgaccattaagcgggcagaggacgctgaccctgggccctgctgagccaggtagggccccgtcatgacagaggctgtgaacccatgctgtcactgtgccaagtgccgccagcctacctccgtgtcatggagcagttggagacacagaggtgctgtaagtggttgtgcagaaaggacccttttctgggtgagaagcacatctcagcaccgctgcctgatcagactcaggaaagcgtgacctgctctcttcccccctgctgacttggggacagtcacaaccaggtgggtggcagctacccgaggagggtcatccatgagcactcaccgggtgcccgttctatgctgaccatgcaaacagtcgtctccttcatcctcacggcgactccatggcggggtggaggggtgctttcctcaaatgtacccactgaataggtgagacgcctgaggtcagaggggcagtaactggcccagagacccagacgtggccctgggccatgctctcagccctggcctgtgccatgctgaactcaagccttgacctctgtgacctccgtgttctggattgcacatctgcctggggtttctgaccccagtggagctgagcctcgccctagaagagcccccaggatggagcccctgtgggtggggtggagggtggtcctccgtccaagtctgtgctctaagatgggtccccacagggggagatctcatcaacccagacttcgggtgcagtcagtgggggttgctgtggaacccactggacatactgggtccctcgtctgggagtggggtggggagccctctatccttgggcagttgtggaaaatgacggaggtccagagggctggccagaaggtaatgatcattcctccttttcgccaggtctggggcttttccccacgtggccctttctctgcctggtcccctagaggcctcgccctttctttgccctgactgttcatgggaggggtccctctggggttctccagaaccaagtccccagagttctctcattctttcttggtgatccggaaacacgaggccccttcctgtattgacagctcagaactgtgggatccaccatcccgccacctgagacatctccgtgagcacagaggctgctttggcccaaaccaagcaccctcccatttggctggtattattcttgacgcggcttctctggccagaaggagtggagatgggggtgaaatggaggagtcacaaggtgtcttgttccctgtaggaaagtgggcctcttggtggtccctgagcgatctgggaggctgagcatatggagctctctggtccctgaccccagtctgcctccaggtgcccaggatagcgcatcaggagcccctcacccttggcaggtggacgcagttcatcctgtgtgtgcctgtctctgggcgtctggggacaacaggcctctgtgtccaggtccccctgtcaggtgcagagactccagagaccccagcaggcatggggccactgggtcttcacccagggctgtggtggcatggggctcacccggccggcggtgtctcagagcccccgggagcggttcagatgttctctgaagcgctcaggtgcagcgttgcctttgggcgatgttgtctcacaggatggacgtggaggaagacgtggctaccctacttgcacaggagcagggggcatcattgcccagtgtgagcaggtacaggtcgggctgctccctcgagagaggtggggcctcgcctctcccactgtgccctggtgggaggatcctgggctcccttaggaagcagggtgggagctggttgcccatgcctttgtgcccccacagcccttcacctcagccccctcactctggacccctctgggtcccagggacgctgtagggcccaaggatgtggacagcttacaaagttaccgatcgcctcgagattctgcagtgagtcctctgtccctgctgcccgaccatcaccaaactcacctcagaggatgagttttgtttttagaaaagcctctctgaggcaggacacgtcttcccagcttgggccagcctcctttccagggtaggaatgccagctggctaccctgcaggtggtctgcagcaggccagagctgcgaggctcatctagggatcttgggggagcaggtggggatggagaggctctcagcagagcagtctcaaaggcagcatgagagtagggaacagcctgagggtctggccctgtcaccctgggccctgccccagtgagacccgcaggctgtggccacagggcaagggggtgcctggcccagcctgtgggcagttgtccagcaggtctctgaggattcagggggcccagctgagccaccctacagggaggggcgtggggggcagtgagggccatacccctgggagggcggaggggaagacgggcagggtgtcagccagggcatgtcagggtgagggcagggatgcagcagaacttgcagctgaaggcaacctgccttggtgctgagagggagcctgggtcctgggaaggggagcccagcctggagcctgcccctcaggagtcacaggacagagagagggaggagcctgggggaggttggttggggacgatcccacgggaggtgccacttctgggacgcacctgaatggagccagcctagggtggagctgatggcctggggtgaacaacacatgaggtggggctttagcagaggggcctcagtcagtccccagggctctgcatggccctccggagaccctggctccccgctggatccgtcagcacaaaggcagagggaggagcaggaaggccgagtaggggcaggcaagacagtgggggaacaaccaggggcccagtgcatggctgccacagtggctcagaggagggcaaggactgatggatggacgacagccccgagagccagctgagtttggagacggggctgtgtggccatcccggctgcccgcggggctcttgctcaccctcgtcacctctggcatctccccggcagcacttagcagcccagtgagagagcggtcaaggcaggcgtgtggatggatccagggccctctctcaagggttctgacagatgagggtcgaagaagggccaggctgtccagtctctgggccagagaggatgggcaaagtcaaggaacaggcagggtcagcagccggggtgcagggagaggcaggtgtatgctggaaggtcaggccccacgagggcccttgggggcatcaagtgggacagggccccggcgcaccctcagtgccctgggcaggcctcgggccagtgatgtggtcactccctcgggaaatgctgttgggaccggaccacccaccctgggccacacccatcccgcctcaggcctggattttctgagctcccgcagagtgtgctgcctagcccaggaggggcacccccattgtgcaatccaagcctcgccctccacaagccccaggcagcccctgttgggtgggccctagttccctcttctcccaggccccagcccctcccaggcgccagctggcagggaagcaccggtcctcccttccctgtgtgtcccctggatggagacctggggcgggggtgggggacagggctggttctttcctggggcccactaggggaggaggaggacagttcctggcccagcacaggtcctcagctctgcctgggttgccttacagtgagacgtagctgccacccatcagtgccctggaagtgaaggtaagagcctgaccctgctgtgtgagtggttggtccagggacagggggacccagtgggtggtcagcaggctgtgggcctgggtggtgatgagtgggagcgacaggctgtccctgggcctgcgggacctgacctcaagactctgtccccatggtggcttgatcaaatcctaaaccgagaaccacagtcgtggctcagcagtcactgcccacttgtgccaagaccccacctgaatgttgggactccaccaacgcccggggtgcctgtggcctgaggatggcatgtcccaagtcatgaggccaggacacctgtgctcattcagtcagagggtctccattccctggggccggccctttcctggctccttccagtttgatcctgtcagggccctggagcccaggacccagcatccaaggggcatcctggcagctccactaacttcatcttatttgacagagaagacatcaggagatgagggacacagaaaaatggctccaggtgcttctcgactgccagcgacataggagcggcaaggaggtgacatggggagggaagggccccgtgaccactttctacagagtcagggtgacgggctcccacggctgtgtcctggcacccccagcctctcagagggtggacactacactgggacaccagctttcctgttcttccctgcaaacctcatcttgccaggagagagtctgatgccagggccagggccagccctagctcaggggtagggacaccccctggtgacccgaaggaaggagtaggtcaagatcagagttcatgaccgggcgcggtggctcacgcctgaaatcccagcactttgggaggccaagacgcgtggatcacctgaggtcaggagtttgagaccagcctggccaacatggtgaaaccccgtctctactaaaaatacaaaaatgaaccgggcgtggtggcacgcagctgtaatcccagctactcaggaggctgaggcaggagaatcgcttgaacccaggaggcggaggttgcagtgagccgagatcatgctactgcactccagcctgggtgacagaccaagactctgtctcaaaaaaaaaaaaaaaaaaaaaaaatttcagcatttgcgacccaccaagacgcagtagttaggactcaagctcactactggcttgggcatccaagcaggaggagaagggtctcaaaggtgtcaaagtaagatggaaagaggtcaaggcccagacccctggtctaacctgagcttgaccaccatttcacagagcaagtaatgacgccctcctcccagacttgccccaaagccccccagagcttggtggtgtcccaggacggtcctcccaggaaacattttgaataagttgctgaagtgcctgatggacgtggctctcgtcacgaaatgagtttggatccgagaagccctcttcttcatcggaaaacaggcaggggtccaatttcccctccacctgaaccctgtcagagcccttccagctgacggctccacatgttgggagggcctctcatttcaagatgggtcaggggcttctcaggattctttagcccaaactgtgccagcccacgaggagcacgtgttatgaacgtcattcccaaagatcctgcggcacttggtgaacagacggtccccttggctccttcccagaggccctgggtcccatgggccaggggtaaaggggcggctggagcccctggtggggctggcaagaggctgagtcccagccagggacatggagttctccatggcttcggagctggagtttccttttcccgccctggagcaggcagaggcactcaacccgggccgagcttgggctgagcagggctaagggaagtatgtcccgggggtccatgcagggggcaggtgtcaggggtgccccagccaccacctggtgttctgtccctcagggaagggtctgcagaggggcctggaatggggaggtttgggggcaggcctgggagccccaaggacctctgctgctcccattaggacaaagatgagctgcgtgcccataattccacgtttacgctgactcctccagtgcctcatcaatgaagtaagcaggtacagtcatacatcagtgaagtaagcagggagcccccagcccagggaccctcctgccccacagtccctgcatcccctcctgcccacactccctgcatcccccagccctccagcccagggaccctcctgccccatactccccagatcccccggatcccccagccctgagatctggctcccgaggaggacctggctcacccccacctggcaggaggcacaggcgtgtccctgcagggcacataagccaggcaatgccccagaggggacatcccacagcagaggccggggctcagcccagcctcatgggcagacagggccaggactcaacctgggagagcccagggaagccccaagcccttggggagcctctccttccaggagccacatccccactgaaatgagtctcctccatgaggaactacaggacctcttctgatccagcctcacaggggagtggggtgggggatctcatcccatggggaggggtccctggtgctccagggcactgaaaccccaatgggccctgctcaagccaccagcccccagctaagaagggtcaggtcctcccactcctgttgttccgaaagactctctttgggcttgccaggcagctacgttctggatggctagcatgtaccgaaggcacaaaacctccagagttggcagagttaagtcctggcgtgcccgaggctatccaggggaacacgcgggacagacagcaccctcagcctgtccccatgaccctctgctccagtctgaggggcaggacaccatgagacctctcagacacagagtccaccctcgacatgacccggatgaaaggcaggagtgtggtgagccccttcctgcccaggcctccccctggccgtggcctcctgtgcacagctggaccccaggggtggcccgaaaaggacccagcactgcccagtgggagggggccatggtggaaacagggtgtggacaccaacctctcccagggacccctcccagcctgatgcccatcctgctcctagagcatctcatgaagctgtcccagtccagcctgggggagctcatccaggaccagttcttccgggcctgggccctggaggatgccatggcgctcaggcaccttcatgtctccatggggttactgatgaggaggcgctgagtcctgctacccccaggtgggccccagtaccaggtcccctcccaagtcaccctctggggcagtcggccagggcccctacagcctcactacctgggccttcctcctgcaccttttttccccctctaagaagcttctggaggccgggcgtggtggttcacgcctgtaatcccaacactttgggaggccaaggtaggtggatcacttgaggtcaggagttcgagaccagcctggccaacatggtgaaaccctgtctctactaaaaatacaaaacaattagccgggcgtggtggtgggcgcctgttatcccagctacttgggaggctgaggcaggagaatcacttgaacccaggaggtggaggttgcagtgagccgagatcacaccattgcaccccagcctgggcaacaagagtgaaactccatctcaaaaaacaaaaaacaaacaaaaaagaagcttctggaaataagcccgtgggtcctcagggcaggtgctgagcacatgtgtgctggacatgctgcagatcaggcaggggaaccaggggaaagactcttccaagccccaccactgccaccttccacagtgccctgcttttgccctcgaagctcgctgaaggggacccatctctgcaagcccacagccctacctgcagcatccacagcctcagagagcagcggggccccttacccctgaaccccctccaagagcatcaggacaacaagccttgagctgtggagacaagagaatcagtatccctggcccagggaggattccaggagaggacacgggcaggagccctggcccagagccagaaccaagagtccagccaggtatggaaatggtccagtcctggcatggagtggatggcctggggccatccatctcacccactgtggagacaggcccccgagtgaggtggcaagggggccaggtgacagcaaaggcctctcccatctgaattctgaatcaggggccgcatcccagccggcacagccctggggtgagagagagaggcaggaagccttgagccagcccaaaccctcggggctgtcttaggagcaacctgaggtgccccaacagctcccccgcccaagcgcacacaaaactgtcactccaggatcagctacctgcaggagagtccgcagcatcggactcagggagccacacagggaccgcagggactccaaagacccgggtctggggggcccggccctgtgaggacctaatgggctcagttggagaagcggacgccacacatctgctttcctttcagcgaaactggaactagggtccccggcacccaggactctgcgagcatcccccaacagcaagcccttctgcaagggagacgggttggcccaccccaggctgtccagctccagcagccttgcaggcagcctctccagaaaaagagcctggtcctccccaccctgctccccacaggctgtccctgaccctgaggcccagaggcacaagaggacttctgtagagcccaggggagcaggctgttctcttggggccccagcgggctcaaggtgtggccaggctgtccccaactcaggatagatcataggctgtcctgcgtacctcctctggaactccctgcccaagctctgccatggacctggacgtcaggggcctgtggtttaactttgaatagggattctggaccttacacgtgtgccctggacagccccagaaccatggggtggggaccgacccagcaagcccaccggggccctgaaacccggccctgccggacactgtgataataaccaagaggcaagtccagagacatccactttgcccaatggcacctgcatccaacttctcagcaggcagtgactggcatggtgtgggggcagccggggcagcacctggccagcacctggccagctgccctgtagcccccgatggctccagtgcctctggacctcattttctactttctacggggaaacctactccctcagaggccaccagagggaagagtgagcaaggcgttcctgcagtcccgaccagccagcggcatgtcctgtggcctctgactcaacctatgagacagagctctgatcccagggcacacttcccaggacacggggcccagcctcaaccagagccctgtgaagggaggggcaccaggatgaccacatgggggaccatggcgctgcacacctgggcactgtacttctcattggagaatccaggcaagatcttgaagcaggtgcatgaggtcctgagcctgtgcagcaaacagcactcatctggggttggcacgaaggggtctacagagccacggccaccgcagcctcttcccggccccatctgtgcagtgcaagtgatccacgcctgctcctaaacccagcccagcaagcagcagcagcccgggcccccaagcccgccaggccaatgtgctgcccagaggcttcgaggccctgcccgctgtacctcccaccacctggaagctgcctcctgacgccttccagccactgctgcagccgcaacaggtgtcgcggccagtgcaggctttccagacggtggcagcgcccagcagccgttgcctcagctctttggtggcagccaggccaacaagggcagcaacgatgactaggatgatgagtgagcaaacagctccacactggtggacaggctgggtgcgcacccggtggtcctcaaaggctcgctgggcctgtaccaccgttataaatttgagatcatgagattataccgtttgccttcttgctttttgaagtacgagtatttttatgcacactttgtagacttcaaaatccatgaagagtctcaaagaagccggatggatggagcctgctgcggatgccttttactctcgtagatcagggtgatttacattccacctgtagtctgcttgcaaacacacagagcagccttgcagctttgtgcctttagactcttggttttgcatttctccctgctcccttcttccttccagtaagctgcaacttttctgattgaaagggtgcaaggctaacacacggaatgactaactcaggatcacatactggcagtgggagaggcaggaggagcagctgccatcaattgccagggccaagtggatgataggatggatgctggtgcatgcggaggaggcagacgcaacgctcatctctaataatgatgtctgttccctcagaggcggctagagcatcacctcttcacgcaagtgtcttgaaactcagcttgaagatttcagcaaatgtgtcttacagagaagagaagagggagtcagcccatcgggattaaaaatatagaggcagtgacaacacacactcggcttcagttcttaggagagttttggttttgattttttttttttttttggagaagattttttttttaatggatctacactgttaactgagactctgttgagattcactggtttacttaaaaacttctcagggatgtctgtaaatttcagtgttatatgtcatgaaaactggtgtgggcagatctgttggttgaaataatttctactgtttcaaatactgaaggcaggaataattggtttatactgtgttttaaatagaagtattactggtaagtcccccaggacattaaaccttaaaaatcagttttaagctattattattgtaagagaaatacaaatggctggaaaatgccacagagattcaaaagctgcttaattgaaagagcaggaagggattctggcttgcaatgccaaagtttcaatgtttttgtagttactgagctaaatcatatggtaattgacagtttctaaatctgtcacctaaaggttaaattatctactgttgccgtgaagtcaaacttactgctgcctcagaaatccctgggtaccgcgatggtcatacagaagtaaggaagtcaatttgaaatgtcagtgagtcaaaatgattaaagaggccaggtgcagtggctcacgcttgtaatcccagcactttgggaggctgaggcagtggattgcttgagtccaggagtttgagatcaacctgtgcgacatggcaaaaccctgtctctacaaaaaatacaaaacaaatttatccagacctagtggtgcgcgcctgtatagttccagctagggggctgaggtcgggggatggcctgagcctgggaagtcagggctgcagtgagccgagatggcaccactgcactctggcctgggtgacacagccagaccctgccttaaaaaaaaaaaaaaaaaaaaaaaagatttaaaaaacggtctgtttatttaaaaagaaaagtgaaataatgcccaacagtacatttactctcttttcaggctgggtgcgctggctcacgcctgtaatcccagcactttgggaggccaaggcaggcagatcacctgaggtcaggagttcgagaccagcctggtcaacatggcaaaaccccgtctctactaaaaatataaaaattagccaggcatggtggtgcaagcctataatcacagctacttgggaggctgaaccaagagaatcacttgaacccaggaggtggaggttgcagtgagttgagatcacgccactgcactccacctgggcaacagagtaagactctgtctcaaaaaaataataataataatttcatatgggttaaattttaaggtcagatgatcacaattttgatattttgtctaattttataccttaggtgacttagagcctgatttaacgtgactttgtcttgactacggatacgtggaactgcagccaaatatattgttctgtttttaaaaaacaacaaaaaaaaaacctgcttcagttactaggactgaagaaaactgggcaaaggggggcccaggaggctaggtccctacatctgccattcttggcagctgcatttcacggttagaaaaactcaggaaatagccgggcgtggtggctcacgcctgtaatcccagcactttgagaggccgaggcaggtggatcacctgaggtcaggagttcgagaccagcctggccaacatggggaaaccctgtctctactaaaaatgtaaaaattagccaggcgtggtggcaggcgcctgtaatcccagctactcgggaggctgagggaggagaattgcttgaacccaggaggcggaggttgcagtgagccgagattacgccactgcactccatcctgggtgacagagcaagactccctctcaaaaaaaaaaaaggaggaggaagaaggaagaaggaagaagaagaagaagaagaggaagaggaagaggaagaggaagaagaagaagaagaaggggaaggggaaggggaggggagggggagggggagaggaggaggaggaggaagaacaactcaggaaaggaggtctcacacactgcagggaggctccaagctacaaagttgggggcgatgggggggaccagggctgccagtaccaatgccttcatccctttgaaggcctccctctcagaagcaaggaccccctccttggcctcaagtccccgccctcgttggttaaaacacaaatcacttctctgtcgttatgacctgcctgtttttgactgaaatggtcatacagaaggaagtcagtttgaaatattggtgagtcaaaatgattaaataggccgagcgcagtgtctcacgcttataatcccagcactttgggaggctaaggcgggtggatcacttaagcccaaagctctctgcaggaagccccggacaccctggggcaggcgggaggagagggcagcacaacccaggctccacccagcttctctcagcttccacctcccaaaggccacagaggagcctgggacaggagcagagggcgggggttccagtgacttctggaacattcatgatggtccgtgcaaagcattcctgggagggtccgtgatcacctctgtccctgggtggctgggctccagcagcccttccttccttctgtccattcttccttctgcctgcacctcctcccagcatgtggcacccccacatcctaagcctgtgtcactttctttccatggattctttgaccgccttcctcttctcactgacttggcatctaggggcttcttggtggaggaaggtaactggtaagaaatgacatactgaggccaggcgtggtggcgcacgcctgtaatcccagcactttgggagatcaaggcgggtggatcgcttgagtccaggagtgcaagaccagcctgggcaatatagtgaggggaaaaagaaaaaaaaaaggaaggaaggaaggactgagaaactagcagagtcttctggctgtctgggtgtacggtccagccctacggggcttagcgggtgttctccctgtgtgcggagatgagagattgtaagaaataaagacacaagacaaagagatgaagagaaaacagctgggcccaggggaccactactaccaagacacggagaccggtagtggtcccgaatgactgggcgtgctgaaatttattgcgtacaagacaaggagggcagggaaggagggtgaatcttccaagtgattgacaaagtcaagcaagtcacgtgatcataggacagggggcccttcccttttaggtagcggaagcagagagagaacgcagcatatgtcagcgttttcttctatgcacttataagaaagatcaaagactttaagactcactatttcttctaccgctgtctactacaaacttcaaagaggaaccaggagtacgggaggaacatgaaagtggacaaggagcgtcatgaccattggaacacagcaccacagggaggggtttaggctgcgggtaggcctagataatatccagccttccacaagaagctggtggagcagagtgttccctgagtcctccgaggaaaggagactccatttcgcggtctgctaagttacgggcgccttcccagacactggcattaaccgcttgaccaaggagccctcatgcggcccttatgcaggcgtgacagagggttcacctcttgccttctaggtcacttctcacattgtcccttcagcacctgaccctctctactcgtcggttattcctaggttatattagtaatgcaacaaagagtaatattaaaagctaatgattaataatgtttatattaatgattgataattgtccatgatcatctctgtatctaatttgtattatgactattcttattctaactattttctttattatactgaaacagtttgtgccttcagtctcttgcctcggcacctaggtaatccttcgcccacatctggggacagtcctcatgtgttcctaagctcagcctcgagggtcctgggctggtcacctcaccgcatctgcactgtgtctctagatccagactccacgggaagggcttgggatgcctagcacaaaggatgcctggtgtgacaaacatccctccattccctggactgcagctcagcaaaaggtccaggtggtgccatgccaatttactgtccctttgagatgagcccatagggccttgtggggggcgagtgtgaagctgggcgcctggagcctaaggccagctgtccctccctgtgtcctggaggaggggccctgtcccaaaaagaccctcaggggcctggcctgtgagtgcagatgtggggaggggagagtctgtgggctgagtgggggccacaggaacggactttgagcaccatggctgaggggcctggtcagtgggaacctggacattgtggcctggtcagccgaggcctggtctggtcagtggggacctggaccttgtggcttggtcaacaggggccttgtcagtgggacctggacattgtggcctggtcagtgggggccttgtcagtgggacctggacattgtggcctggtcagcgggggtctgatcagtgggaacctggacattgtggcctggtcagctgaggcctggtcagtgggtacctcgaccttatggcttgatcaacaggggccttgtcagtgggacctggacattgtggcctgctcagcggggcctgatcagtaggacctggacattgtggcctggtcagcgggggccttgtcagtgggacctgaacattgtggtctggtcagtgggggcctgatctgtgggacctggacattgtggcctgctcagcggggcctgatcaatgggacctaaacaatgtgtcctagtcaatgggggcccggtcagcggaggctttgtgaatggggacacggtccttggggacatagtcagaaaacacctagtaaatgggggtgttgtcagcagggacctgctcggtgaggatctggtctgtgggaggcctggtcagctgtggcctggtcagaggggactgatcatgggtcctcgagttaaggacttagtcacttggcacctcatcagtgaggacctggtcagtgggcgcctggtcagcggaagctgggtcagtgtgatctgattattgggggtctggtctatggggacctagtcattggaaacctggccactggagcctgttcaatagaaaggtggtcagtggaagcctggcagtgagggcctggtcgttgggctcctgggtagtggggcctagtcagtaaaggtctattcagtaaggacatggtcagttggaattttcttagttggggcccagtcagtggggacctggtcagcgagggcctagtcagtgggacttggtcagtagggacctgggcactggagtcctgggtagtggggcctagtcagtaaaggtctggtcattcagggcctggtcagccagaacctcatctgttggggccgtgtcagtgagctctagtcagtggggacctggcaatggaagcctcatcagtgggtcttggatagtgaggcctagtcactggaggactggtcagtggggacttgggtaagggggcctggtccctaaaggtctggtcattaaggacctggtcagttggaaccttgtcactttgggcccggtcagtgggacctggtctgagggggtcttgtcagttgggcccaagtcagtgggagtctcatcagtggggcctggctagtggggcctggtcagtggaggtttggtcagtggggtcctggtaagttggagcctcatcagtggggacctagtcagtggggacttgtcaatgggacctggtcaggggacccttgttagaaggagcctggtcagtggggcctaggtagtgaaacctggccactgggggcctggagagctggggcctgctcagtgggacctggtcagtgttggatgtggttagcggggcctcatcaactggggcctggccagtgggacctggtcaatgggagcttggtcactgaggtcctggtttgtggggtctagtcagtaagggtctattcagagagacttggttagtagggacctggtctttgaggccctggagagtggggcctattcagtaaaggcctggatcactggggtcctggttagtgaggcctagtcagtaaaggtctggtcactgaggacctggtcagtcagaaccttgtcggttaaggacctggtcagttggaaccttgtcagttgggcccagtcactgggggcctggtcagtagggacatggttagtgaggacctggtcagtgggggccttgtcagttgggccaagtcagtgggagtcctgggtagtggggcctagtcagtaaaggtctggtcattaaggacctggccagtcagaacctcgtcagttaaggacctggccagtcagaacctcgtcagttaaggacctggccagtcagaagctcgtcagttaaggacctggccagtcagaacctcgtcagttaaggacctggccagtcagaacctcgtcagttaaggacctggccagtcagaacctcgtcagttaaggacctggccagtcagaatctcgtcagttaaggacctggccagtcagaacctcgtcagttaaggacctggccagtcagaatctcgtcagttaaggacctggtcagttgggtccagtcagtgggggcctggtcagtggagacctaggccatcagtgggtcctggatagtgaggcctggtcattggggtcctgggtaagtagggtctggtcagtgaaagtctcattgatgaggcctagttagtggggtccaggcagtgagggcctcatcagggggacctagtcagtgagtcagtgagggcttggtgagtgggggcctcgtcagtggggccttgtgcctggtgagtgtgaacctggtcttcaggggcctggtcagcaggtgactgatcagtaggggtcagtgcagccctggccagtggctgcctgatcattggacctaatccatcggggcctggcagaggtgggggaggggtgagggggggtggctgtcagtggggcctggtcagtgacatcctggtcagcaggctcctagtcagagggagcccaatcaataaacctggtcatcgggggcctggtcagtgaaaacttggtcggcagggttggtcagtgtgtcctggatattggggattggtcaatgggggaccaggtcggtggagacctggtcatcggggcccatttagtgagggccaggtcatggaaggcccgggtgatggggccctggttgcctggtcagttggacctggtcatcccaggactgatcctcagggaacactctgacttcaccaggctcccctgaccatgccagtccctggcctgcagccaatggtgtcctttgtgtctctcccagcacagacccaggcccaggggatgcccaatgctgggaggaggctcagacagcaggaaggagagaaggaaggaaggaacttccgtagtaccgatgcctacaaaattacaacacgtggtgctgtttctactccatcaccatgttcgctctttatttcctatgtaattctctattcaaccggcctcagttgagcacaaaaccatccttgtaccaccatgaatagttggccatggctctttgatagcaatttttgttctgccgtagaaattatccttgaaccagaaaaaaaaatccccaattcaacactccatttttgtgaagagctggttccgaattctgggtcactttttggaaaaaatatctgttgtggtaaacagtgctgcatctgtgatctcaagtctctactggaattggatagagatggtgaatttcagccagagcgcccaaagaactcgtgtcccgcgctcctgaacgccatcagccgccgcacctccatcttccctcctcccacgagtctcctgctccccgtgactctggtaagagctcctctgtgaacgtggaggtggtctgggaagttggcccagtgctcctgggaccgcactaacaggtccgagacggggtccaggtcctgcctgggccaatccgggaagagcttgccaatggcatcacaggcacctcggggaaggggatggtttggttcaggaccacccagaggcctgctgggcccactccaaggcctggctgaggccacagaagggctggccgcctgctgatgctccttcttgaagcccctcacctgctggcagtgagctccatgccctgtggctgagcagcagcgctgttgtccaccttcctgggcaagcatctgcagctatccatcttgctctccacctcctgcaggttgagggcagtggtgggggtagtgctcagggtcaggaaggagctgacccccaccatgccacccttctcacccttcctcttgccctgtttccaggcctcctcgcagtgttgctgggccacgtcaggaagtgctggaggacgtggcattgcaccaacaccaggcggccagccgtgtggctcatcccgcaaatcaggctcttcctgtgcatggagatggagtccctctggaggcagcccgtggccctgttctcgggcaggtggagcatggagacgactgggaacttcactagacacgcatccagccggttcaagggcttgtcgcgccgtgcaccagcttgcaggagaagtaggtctttatgtccttgaacttgttctactgagtggtgtcgccagcggtgcactgggttctcctgccacttggggccatggggtaggggttttcctgccacttggggccatggggccaagcaccaacagcaccatgcacacagcttgtccctgtctttcacagagcccaacgcctcgccaagcacgaaggcctcccttcccgacttgatgaaggcagagtagcggttgaggttgcggctcacagtgaccgagctcctgcccacgtggggacccagggagccgtcgagctccaggtatgcacctctgcccagtgcacctggatcgttcaccgtcatggagctgccatcccacttgtcgtcccagtcatcatcactgccctagctggcctagttgccaccaaggagctgctgaggccacggcttcagggcatccctaccgcctggaaatcctgcgctggctgctggaaggcactctgtggtggcaccagctgcggctgcagtagcagctggaaagcactgagagatggcttcaaggaggcaggcagtgcaccgggcagggccttgaaacctctgggtggtacaatggccatggcacagtgggtcaaggcacaggggcagccatggcgcgctgggccagtccagggttgcagaccacttgcactgcagatataaggccagggttgctgaggccatgagcccctgcgagtcagcccttgatgtcctgctcactacacaggctcagcacttcatgttctcatagatcactctcaaattttctgccatcaagtggtacagcaactgaatccacagtgccatgggttccctgcgtggtcatcctggccactgtggaggcacgtgacacctctagttcccctcccctcccagggctcaggttgaggccaggcccctctggtcctaggaagtgtgccctgagggtggggctctgtcctgcaggttgagtcagaggccgcaaggcacgctactgatggctagggctgcaggggtgccacactcacccctctctggggaagtcttagagtgaacggcgttctcattagagatgacttcccaaggcccaagagccatctagggctgtggagcagctagccgggtgctgccctaactccttccacaccgggctggtcactgccctccaagaggagtcggatgcaggtgccattgtgtagagaaatgtctctggatctgcctcttggttatcatggggcacagtagtttctggtgtctgggctctgatgaagccgtttagccgatccagggcagatgtggaagtgacaggagctcagcatccctgttcaaggtcataccacaggaaacacaagcccccaacgccagcctgctccatcggaagctttggcatggaattccaccagaggtaccgccagttcacccaaggtctgtcttgagctagggacggcctggccacaccctgagccccggaggttcccagagagcaaccttctgccctgggcgctgcagaaacccccttttcatgccactgggccttggcctcggggacagcctggccaggctagggtaagggaggaccaggctcccattccagaggagtcgcctgcatgtgctgctggagctgggcgggtgggccggggagggccagcccatcccccttgcagagaggctcaatgctgggaaatacccgaagagccctgggtgctggggtccctcccttaagtttgcctgaagagaatgcagatgaacccagcctctccaccaaacccatcagatgttgtcgcagggccaggttctgcacatctgggtctctggagtccttggggcccctctgtcctccaccctagcctgacacagaggacacccctgcaggctgcagatcccagagcaaggggtgtgtgcagctgcctgggtatcccccctgggacaggtaacacaggctttaggctggcttatgcctcgtatcctcatcccagggctgtggggccggggatgcagccctgattaggagctcaggtgggaagaagctctcactgtcacctggcccccttgccacctcacatgggggcctgtctcaacagtgggtgagatggccccaggcacggggtcctctccgctctctggggccatccactccatgccaggactggaccattcccacgcctggctgaactcttgtttctggccctgggccagagctcctgcccgtgtcctctccccgaatcctctgggccagaaacactgattctcctgttcacctggcatccctgaaggcgcgctgtggagtgaggggaccctgctcctcccggcgtctgttgatgctcacagcgggggcagggagctcgcacagaccagagagagtgtaaaaggtgcagggggcacccccgcctgtcttgagcagcatgtccagtacacgtgcactcagcacatcccctgaaaaccggcaggtctatttgtagaagtttctctgtgtagaggaggaagaggtgtgggaggaaggtccaggtagtagggctgcagggacccaggccccctctactatcaactgccccagaggatgactcaggaggggacctgatgctggagcctccctaggggtggcaggtcccagtgtctcctcgtcagttccttcatgcagacccaaaagtgcgtgagaaccacatcgtcctccagggcccaggcctgggagaacgtctcctgaaccaatccttatagtccagactgggacatattcatgaggcactctagggacaagggggtagcatggaaggggtcggtgcccacacccaggtttccaccacagctacctcccactgggaggttctgggtccttttgcagccacccctggcttccagctgtgcacaggaggccatggccagggggaggcctgggtgaggaggtgcccaccacactcctgcctttgatctgggtcttgtcaaggtgggctccttgtctgggaggactcagtgtcctgctcagcacaacaggcccagcctggccctccagactgaagcaaagggtcatggggacagtgtgagggtgctgtccctgggccagtccaggtctgtcctggggagtggggctgggggtcttcctggcatgttcctggaacagagtcactgtgaggatgaacaggatgactgtctgcctggtcagcacagaacgggcacccagtgagcactcgaggatgaccctcctcgggcagctgccgcccacccagtagcgactgtccccaagtcagcagggagggaagagagcaggtcacgctctcctaagtctgatcaagcagccgtgcagagatgtgcctctcacctagaaaagagaaaagcgtcctttgggcagaacccactcacactgtgtctccaactgctctacgacacagagccgggcaggtacctgggtgttgggtaatggtgacattgtgggctcacggcacccatcacaacggagccctgcatgggtcagcagggcccagagacggcatcctctgcccctcctgaactgtcgacgtgtgcgtgcaatgcgtctgtgcacttgagtgcaggtggatatgtgcgggtgcgtgtgagcgtgtgtctctcctccggccggccctggcttccccaatcacgtgtgcccccatgtcctcatcactgtcaccccagggcctgtggtcagcatcagagcatccacaggtgcgccccagcctctgccttcaggcagggtggtcctggggatgcaggcagggcagggcagtgccgtgggtgaaaccccctccctcgggagggactcagtgtatacggtactaaatctgcatagcagggccatattcaatgcacttctcctcctcccagtagctctctggggtgcagttgatttcatctcccctacaaatggaagaaaggaggcttctaggacaaaccccctgcctgaggtcacccagcagccagctgacctcgtccttactaagtccccactaaccaggcccccactcaccaggtccccacccaccaggtcctgttgactaagccggactgatcgtgttctgtgctgaccaagccctgcagactgggtcccactgatcagtcccccccagtgaccaagccaccactgacccggtcccccgtgaccatctacccacagacaagggcccatcttcttaagtcaacccatctaagaaaatgggtttggccccagaccaaagccattttcttaagttccatggagctcactagggtataaagccaagtggggagaggctaagcttcagaatctggacgttttcaacatttccaggtatttccacattcttcacagtgatttcaccaatgtgctctcccaccattgagggtttctacctgcctccaaaactgctggtgttgccagacttttcatttatgttgggtgttgggtttgaaatgcctcatggtggcttcttgttcctcatgactggtgaggttgggtgcccttgtattttaatcctgtgccaactgggcccccccacccccacccccgccacttgctgtctctgcttcgtaaggagatcttcttgcccggtcaactccgagggatcacaggttcaggggtgcccccaaaatgagacacttagtgtttgatgaatgaatgatgatgttgaggccaggagtgagaggaaggtcagcaggcagacagggcccatgtggacagaaagggtttattccaagtccagacatgaccaatagcgataaaaagggggaacaattggagtaatccatgggagaaggagtgagcctgaatttgaaagatggagagaactggacgtggaggaggggagggaggaaggcagaacaaaggaaataagaagctgttgaccaaaatacatatgttgtgattccatgcatatgatcaaaacgtgatcgtgtaatcatgcacatttctcaaattcaaatggacaaggtatacataatttttcccattcctcccacgaagcacaactaaaaccctgggccagacatcatacataaaaacataagactctgaataagattcagcctttaaaaacaaagcttgtgtttacgtggatgaacccggaagacgttcagtgaaataagccaggcacagaaaaacaaatacttcctgtctcacttgtggaatctaaaaagctgaactcccaagtagaatggtggctccagggactgagggagggaggagggactgaacagatattggccaaagggcacaagaggaattgttcaacatggtgactctagtcaatgtattttattcttgaaaaatgctgagtagtctgggcgcagtggctcacacctgtaatcctagcacgctgggagactgagggggatcacttgaggccaggtgtttgagaccagcctgggcgacatagtgagacctcatctctttttttttttttttttttttcaatataaaaaaactgaattgctgagcaaattttaagtgttcttaccacagaaaaagagataagcatggaggtatggtcacgggtatgtcaaggaaatgttaaattagcttgatttagatattttacgctgtacgcctatgtcaaaacatgttctatgcatcatatttacaactttgtcaaaataaaaagtgattgggaaattggatcaaactagaaaaatgtaagactctgaatgatggagggaaggcagacacagtgggaatttcaggacccaaggaatgacacgaaagtcaattctttggtgttttgttttgtttttcgccacatacagcccaggcttggacctgaagaagctggcaacccgcgaacgccaacaggcacagtcgaaaaaagcaaaagaaaaatcccaaacaaaatcctgttctccctagccaaaggaccaggagagggggcagcccagcaagacaaaacacatttacacaattctggctaacctcagccagtccttggccgtgagttcgtttttctgccacctcactttggggctgggctggttctccaccctcgcagggtgcgtttctcaatccagacgctggggggcgctagtacctcgcgagctccgcgaggatcattcccgggacgccgcggagtcacctcccctcctagggacccagagcttcccagggccgcgcctgtaggttttccagaggtccccgaaaacgttaaagacctggaaggaaaaaaaaactgtaaaaccacacactttgatatttgacaacgtaaaagcaaggctgcaaaatcaaaatcaatgaacgcttgaaggaaatgtctacttagctagacatagtgccacctggattcactgttggctccagaatcccccccacggtgtcatcacgttggaaagtttttgtgggttagatgttctctgttggcaagaatgcctgtacatgcccaagaagcatatgagtttaatgggaccccaataacttcaaaagcaaaaagataacgatcctttctacttttttaactttgtgtgtgtgtgtatcagggtcttgctctgttgcccaggctggagtgcagtggcgcaatcacagctcactgcagcctcaaattcctggactcaaaccgtcttcccacttcagcctcccaagtagctgcgaggatgcacaccaccacgcccgactaattttttttatttttttagagtcagggtctcactatgttgccagggctggtctcaaactcctgggctcaagtgatcctcctgcctcggcctcccaaagtgctgggattataagtgttagccaccgcacccagcttcttcttgttttaacaggaagaaatacattcaatgtgagtgccttttaatgtttgatattaaacaagtcctccacgagtgcaggtacccagggatgtgccatacagccctctgccttcacctatgctgttccctttggcctccatcacccttcccttcccacatcagccaattcacctcccattcatccttcatattttagctcagtgttaccacttcaggaaaaccttccctggtcccaagggacaagatactgtttgtcttcacctggaacatcctaagggctcaataacgaatgaatgaatgaatgaatgaatgaatgaatgaatgaatgaatgaacacaggtgcataagcatgataggcttgtccttgtagggccttcccatgccactcaaaatacatatgacctcattgcaaaaatatgaatactggctcacaaagtcatcctgcaaaatcaggcacattcaacaacagccctgtgctgagccgtgtcggggcagtagagaaagctcaacccaaaaccctactcttgagaggctcctctctgggggttggagcacagagccagacacagacatcactggcctgtgtgttcaatgaaggaagggagggagggaaggagagaggccgggatgaatggttggatgggtggatggatgaagggatggaaggatgaatgagtggatggatggatggatggatggatggatggatggatggatgaatggaggaatggagggatggatggatgaatgggtagatggatgaatggatgcagggagggatggagggatggatgggtggatggatgaagggatggagggatgaatgggtggaggatagatgaataaacgaatggatggagggatgaagggatgaatgggtagatggatgaatggagggagggaggaaaggaggggtggatgggtgggtggatggatggatggatggatggatgaatgggtggaggatggatgaataaacgaatggatggagggatgaagggatgaatgggtagatggatgggtggatggatggaggaatggagggagggatggatgaatgggtagatggatgaatggatggagggagggatggagggatggatgggtggatggatgaagggatggagggatgaatgggcagaggatggatgaataaatgagtggatggagggatggatgatgaatgggtagatggatgaatggatgaagggatgaagggagggataaagggatgaatgactgggtggatggatggatgaatgaaggaatggagggatgggtagatggataaagggatgaaaggagggatggagagatgaatgggtgaatggatgtttagggatgggccagagcaagggcccggaaatggggagtagtgacaggaatatgtcccatagaaggtgcttgggcttggtatggaaagcagggtatgaggaatcgtctgtaggaacagggacattccaagcagaggaaactgcagaggcaaaggccctgcagctcaagaaaacctggtttcaggatacagtagggagtgggaaatgactacagaggagactggcaaggacaagtggagccaggttgtgagggacccatccacgacccttaaccatgaattttgccccaaggcatgcatcaaagtactggctattcttagtatcagtattaagatggtatgacacacccaagagtttattatatgctaatagcttcccctgttaatttcagtttggaaaacatgttttatagtgttcacactactctggtggtgcaatatttagtttttaaatcaatatgcctgtacaaaactgttacacaatggcccacaactgtaaccccagtgccttgggaggccaaggcaggaggatccattgagaccaggagtttgagaccagcctgagtaacacacatagtgagaccctatctctacaaaaaaaagaaaaaaaaatttttaatgttggaacatgaaaagatgttcaacatgattagccatcagataaatgcaaatcaaaaccaaaatgaggccaggcatgtaatcccagcactttgggaggtgaaggcaggaggatcacttgaggtcaggagtttgagaccagcctgaccaacatggcaaaaccctgtctctactaaaaatacaaaaattagtggggagtggtggctgatgcctgtaatcccagctacccaggaggctgaggcaggagaatcccttgaacccaggaggcggaggtagtgagctgagatcacgccactgcactccagcctggatgacagagtgagactatctcaaaaaaaaaaaaaagagagagaaagacttcacacttcacactccctgaggtggctataagcaaaaatataactacaaatgtcagcaagtatgtggagaaattggaatccttgtgcattgctggtgggaatgcaaaatggtgcagccactatggaaaataatctggcagtttctcaaaaagctaaatatagaactcccacatgcccccgcaattccgctcctagagatatacccaaaagaactgaaaacaggaccgcaaatagatatttgtacactgacatcatagcagctctattcacgctagtcaaaaggtagtaacaatccaagtgtccgtccgggacaatggaatattactcagcaatatacagaaataaagttctggccagacacagtagctcatgcccgtcatcccagcactttgagaggccaaggtgggcagatcgcttgagcccaggagttggagaccagcctgggcaacatggcgaaaccctatctctacaaaacatacaaaaattagccaggcatggaggtgcacacctctaatcccagctactcaggaggatgaggtgggaggattgcttgagcccaaaaggcagaggttgcagtgagccaaggtcaagccactgcactccagcctgagggacagagcgagagactctgtccaaaacaaacaaacaaacaaaacctcagacagtattatgagaactaggactttgcttttaattataattctgttagttcaatagaacctgagagaagactcaacacttatagaaatacttaaatagaaaaatagaagtctcagccgggtgcagtggctcatgcctaatcccagtactttgggaggccgaggcaagcagatcacgaggtcaggagatcaagaccatcctggctagcatggtgaaaccctgtctctactaaaaatacaaaaaattagccaggcatggtggcaggtgcctgtagtcccagctactcgggaggctgaaaggcaggagaatggtatgaacccgtgaggcggagcttgcagtgagctgagatggcgccactccagctggacaacagagcgagactccgtctcaaaaaaaaaaaaagaaaagaaaagaaaagaaaaatataagtctcaacaggatttgatgaaggctcaggcgtgagtgtgagagaaaggtagtcaagggtgacttcaaggttttggatgagaatgaccagaaggatggagctgctgtttactgagatcattaccaggtctcttgcatcctcaaaaaaaataataataaaaaggatattttctttttccttttttttttttttttgtttgagacagggtcttattctgtcatgcaggctagagttcagtggcctgatcacagttcactgcagaggtcaatggtttcagcgacctctggagcacttatgatgtcccaggtgaagacaaacagtatcttgttctttcaaaaaaaaagaaagttctaatccatgctgcaatgtgaaagaacttcaaaaacaagctgagtgctatgggaggccgaggcaggcggatcacgaagtcaggagatccagaccaccctggctaacccagtgaaaccccatctctactaaaaatacaaaaaaaaaaaaattagccaggcgtggtggcgggcacctgtggtcccagctactggggaggctgaggcaggagaatcgcttgaacccgggaagcagaggttgcagtaagtggagatcacacctctgtactccagccgcctgggggacagagcaagattctgtctcaaaaaaaaaaaaaaaaaaaaagaactggggatagaggccgaactgggtttggcacacagtctgtgggctcaaaagcaagaccagccaggaaacaagggcgcccaggaggtgtccgaactctcaggatgggagctcgaaggacgcagtgaccttgacgggagaatggtgatggaatctgcaatttacttacccacccacacagccctctcctagtagttccttgatggtgggagccacattgagtgtgtgtgtgtgtctttgtacgtgtgtgcacgtgcatgtaatatttcaggcatacaaaagcatagataggctgggcatggtagcacacacctgtaatcccagcactttgggaggccaaggtgggaggatcacttgagcctagaagtttaagaactgcctggacaagatggtgagaccttgtctctatatattaaaaaataaaagtaggccaggcgcagtggctcatgcctgtaatcccagcgctttgggaggccgaggcaggcagatggcgcctgaggccaggagttccagaccagcctggccaacatggtgaaaccccatctctactaaaactacaaatattagccaggtatggtgtgcacacctgtaatcccagctacttgggaggctgaggcaggagaattgcttgaacccaggagatgcagattgcagtgagccaattgcgtcattgcactccagcccgggcaacagagcaagacactgtctcaaaaataaataaataaataaacagcatagataggggccaggtgttgtggttcacgcctgtaaccccagcactttgggaggccaaggcaagaggatcatttgagcccaggagttggagaccagtctgggcaacatagagagaacctgtctctacaaaaataaataaataaataaaaataaaattaaaaattaaaaagcatagataataattcgtgctggaacacagcttgtattcatcacccaacttaagaagaaaaaaatcacggataatactgatgctgtatatacaccacttcacttccatttacctctctctctctgtgtctccctctcatttagcatttatcattcccatgcacatttttttttacctttacaacatgggatgtattcatgaacactatatagaattgtggctggatgtagtggcacgtgcatgtaatcctagctatttgggaggctgaggcaggaggatagcttgagtccaggagttcaagcccagcctgagcaacatggtgaaaccccatgatatggcgtggctgtgtccccaccaaaatctcatcttgaattgtagttcccataatccccacgtgtaatgagagggactcagtgggaggtagcttaatcatgggggtggttaccctcacgctgtgcttatgatggtgagtgagttctcaggagagctgatggttttataaggggcttttgcccctttctgctaggtgcttctccttcctgccaccatgtgaatagggacgtgtttgcttctgcttctgccatgattgtaagtttcctgaggcctcctcagccctgtggaactgtgagtcaattaaacctctcctttataaattacccagtctcagcctgggtgcggtggctcatgcctgtaatcgcagcactttgggaggccaaggcaggtggatcacaaggtcaggagattgagactatcctggctaacacgatgaaaccccatctctactaaaaattcacaaaattagctgggtgtggtggcacacgcctgtagtcccagctactagggagactgagacaggagaatcacttgaacctggaaggcggaggttgcagtgagccaagatcacaccactgtactctagcctgggagacagagcaagactccgtctcaaaaaaaaaaaattaaattaagaaaaaacataaaataaaataaattacccagtcttgggtctgtcttctttagcagcataacagactaatatgccccatctctaccaaaaaacaatatatatatatatatacaaaaattagttgggcatggtgttgcatgcctgtagtcctagctactccagaggctgagaggggaggatcacttgagcctgggaggcagaggttgcagtgcagatcacgctactgcactctggcctgggtgatagggtgagaccctgtctccgtaataaataaataaataaataaataaataaatttattttccccagttgtcacatggagacaagcccatcagggacaagactagaagtagacaaaccagtcaggtaacaactgctagagccaggtgctaaagacaggggcttggaacaggatgggtgtagaaaatgtagtgaggcctgtttggatacatggatatttttggaaggcggggtcaacaggatttgatgaaggctcaggtgtgggtgtgagagaaaggcagtcaaacatgacttcaaggttttggatgagaatgaccagaaggatggagctgctatttactgagataatcaccaggtctcttgcatccttaaaaaaaaaagggatttttttttcctttttttttttttttttttgagacagggtcttattctgtcacccaggctggagttcagtggcttgatcatagctcactgcagccttgaattcctgggctcaagcaatcctactgcctcagcctcctgagtagctgagaccacaggcacaccgcacccagctaatttttgtagagagagattttctattaatatcaataatctttttcaaagtgttgagtcttctcttagcttctattgaactaacagaattataactaaaagcaaagtcttagttctcataatactgtctgaggtttgtttatttgttttagacagagtcacactctgtcgctcaggctggagtgcagtggtgcaatctcggctcactgcaaactttgtctctgggattcaagtgattctcctgccttagcctcccaagtagcagggactacaggtgtgcaccaccacacctggctaatttttgtatttttagtagagacagggtttcaccatgttggccaggctagtcttgaactcctgacctcaagtgatccatccaccttggccccgcaaagtgctgggattacaggcataaaccactgtgccagacctgtctgaggttttatgtattcaacacctcacccattgattaagtcccagaaattatttaatcatcatatttatttgatcagtttgactttattaatatttgttccacagagctttacaggcatcctttaactgatttctaggattcaataaatttacattttttactttcttcaccaaacaacaaattcatttttataaaatttagttgaccctctgagagtttctttataccactgttctctcaagattgatattaattctgttagttatcttttcttttctttcttttttttaatgtttagttttttagagatagggtctcactcttttgcctaggctggagtgcagtggtatgatcgtagttcactgcagcctcaaccgcccaggctcaggcaatcctctctcctcagactccaatgtagccgggactacaggtgcacgccaccatgcctggctaatttttgtattttttacagagacagggctttgccatgttgccaaggctagatcctattggttttcaaatggtatatcacatttacttctataatatcttacaattacacttctgtttcatcattctcataacttactattacgtgttcaaccacgttttaggtatcatttaatacacattgctaggtactaaatgattgctatgtacattattgttagttttaaggactggaatatttccttcttataaagccaaaagaaagtattgacatgcaaggacagacaatgtttttgaggagcattgaaagccaaggagcagagaaaaggaggtagttggaagaaagaagggattctttcaaagctggaagaaattatagaatccttacatctggagctggattctccccagagcaggttttgagtcgaggaattgagtgtaaatattcaggagataatctccagagacccagtgagcacctggagaagagaaatgggaaggaagggtgcggttaaaccttcccctctgggcaggaagatcgcttgaacccaggaggtcagggccgcagtgagctatgatcacaccattgcactccaggctgggcaatccaaaggagtaatccctgagatataatactatagaacaccccagaactgccccactcaggagtgaggaagccagggactcacccaacaagccctgtccctcaacagccaagggtcacttctaggagtgggaactcccagcacatccacattacccccatgtgcaggctgagcctgctcctgtggtcagatgaagccctcgggcatagagacacatggtggtagaggtaaagggtcagtgtgtctgggagccatccacccagatgacaccctgcacatgggctgggggaaaataaacagtgttgcttcagtgtgtttgctgataaaaatgaaggagcaagccaggtgcagattcacacctgtaatcccagcactttgggaggccgaggagagaggattgcttgagcccaggagttcaagaccagcttgggcaacacagcaagaccccatctctaaaaaattttcaaaattagctgggtgtgctggcatgcatctgttgtcccagctcctcctgaggcggaaggatcacttgagcccaggaggtcaaggctgctgcagtgagctatgatctcaccaatgcactccagcctggggaacacagcaagatcctgtctctacaaataaaaattttaaaaaaggaataattgagccaataggaaggaggaaattctattgcaggaaagagttgggagaattgctgaatgtctgaacccaaaagaggggatgagatcgggatgcaatggggtcgggggctggcctcagccagaaccgtggacagctcctccgtttcctttctagttgacccaggttagctacggaagggatgaacgtctaaggcagaatagcgaattaggataaccacgggttaaggcacaagcataagaacagcaggggcagccacttctaggcaacattaggcagtatccaggccacatcctccctcctataataacaagacagaagtttccacttcagcctctgattggtcatgggctgtctccacttcagcctctgattggtcctgggctgtctccacttcagcctctgattggtcacagggccacccttcatagggtgtagccaattagaggcctctaaagggcacctgaggtgttgccaaattattctagcttaataaaaacctcagttgggggtgctcttgagccacttgctcgagcccacttccactctatggaatgtacttttgcttcgataaatctgtgctttcatgactctgttcttctgttgcttgtttgtctttagttgcttctttcttttattgctttgctttgttcaacactccaagaacttggacaactcacagtcaagaccttccgtctggtaatctggtaacatcttgcctgggtctctgagtttctactcttgggcctcttggaggaactcatgctcatcctcttcctgagcatattcctggtcactgggctgaagaacctgctcatcaacgaattgcttgagcccaggaggcagaggttgcagtgagccaagatcacaccactgcactccagcctgggcgacagagagagactctggctcaaaaaaaaaaaagaacctgctcatcatcccagccattgccactgacacccggctctctgtgctcgtgcgctttttccttgccaacctggccttcgtggtcacttgcttcacctccaccaccatccccaagatgctggacgtgcaaagagatcccttgtgtcatgtcaggatgcaaagggattccttatgctggttgcctgacccagatgctcttcttcatctgttaggcatccacagcttcctgctgactgcaatggccaatgaacactgtgtggccatctgtcactctctgaactccatcaggtctgtgacaccatagctctgtggcctcctggtggtggcctcctggaccttcgcattcaggaatgccctgacccacccagtgttactgacccgcctctcactctgcacctacgagtgggtcagccatgtcttctgcaacctcagccagctgctgaagttggcctgctcagacgccactctcaacaatgtgacggtgcaaccgctacacaaaacacaaggacatgaatgccattcagccacacattcttttggcacttcataataataatcacttttcctcccattttttgtggttgttgtattgtttaaacaggtctcactctgtcaccctggctggactgcagtggcatgatcatagttcactgcagcctcaaccacccaggctcaaacgatctcccacctcagcctcccgagtagctgggaccacaggcgtgtgccatcatgcccagctaaattttttgtattttttgtggagatgaagtctctccatattgcccaggctggtctcaaactctggggctcaagtgtgcctgcctaagacttccaaaatgctgggattacaggtgcgagccaccgcatctggcctcttccagttttcaacaacatggtcctcatttccatctgggacctcctcagaatggcctttgccattcatattgctacaacattctcatcactgccacctaggtaaactttgaaaagattgaggctttctctccttttcttttaagacttcaccagaatcacttttaaggccttgttcacaataacatagtctttttctagcatgcacctgcacgctcttccagcctctacccattacccagttccaaagctgcttccacattactgggtattttttttacaataacactccacttcttggtaccaatgtcttagtttgttttagctgctagaacaacatactttagactgaataatttataaacaacagaggtttattgctaacagttctgaaggctgggaagtccaagatcaaggtgccagcagattcagtgtctggtgagagcccatagatgatgccttcaaatggtggaaggggcaaacaagcccctccagggctttttttgtggggggaggggggaggtgaagtattgctctttcacccagtctggagtgcagtggggtgatctcggctcactgcaaccttcgcctcctgtgttcaagtgattctccggcctcggcctcctgagtagctgggactacaggcacgcaccactatgccccactaattttttttgtatttttagtacagatggggtttcaccatgttggccaggctagtctcagactcctgacctcaagtaatcagcccaccctggcctcccaaagtgctgggattacaggcaggagccaccacacccagcctgttgaaaaaattatttgaactttacaatttattgctggaaatgtaaaaaataaatgttcggggtgactgtcaaattgggggaaattctatcaagtttatgtaattttgagctgtaaggtttggaaaacaagcttctgtatatgacgtacattagagctgtgcaccatcggacactatagtgtccagttcaatgggaggaacctgttgcattgcaccctgacctctgactttgcacctctgtgtcacaatgtctttgctattgtgaatagtgcttcagtgaacacatgcatgcatgtgcctttttggcagactgatttttgttttctttggagtatatacccagtaacaggactactgggtcgaatggtagccctgtttttgggttttgttttttgttttttgttttttgtttttttgagatggagtctcactcttgtcacccaggctagagtgcaatggtgtgatcttggctcactgcaacctccgcctcctgggttcaagcgattctcctgcctcagcctcccaagtagctgggattgtaggcagccaccaccacgcctggctgatttttgtatttttagtagaggcggggtttcaccatgttggcccagctggtctcgaactcctgacctcaggcaatccacccacctcagcctcccaaagtactgggattacaggtgcgagccaccgcacccggccaggtagctctgtttaatttctttgagtaatctccaaactgctttccacagtggctgaactaatttacattttcatcagtacaggataaacattccattttctctacagtctctttaatgtctggtggtttttatttttgttttttgtttgtttgttcattttactttttcagaatagccattccgactggtgtgagatggtatctcattgtggtttttatttgcatttctctgatgactagtgatggtgatcattctttcatatgtttgctagccacttgtatgtcttcttttgagaagtgtctgttaatgtcctttacccactttttaatggggttatttggtttttgcctgttcaattgtttaagttccttgtagattctggatattagacctttgtcagatgcacagtttgcaaatattttctcccattctgtaggttgtctgcttactctgttggtagtttcttttgctgtgcagaaactctttaatttgattagatctcatttgtcaatttttgtttccattgcaactgcttttgaggacttagtcataaattcatgtttcctaggttttcttctaggattcttatgatttgaggtcttacatttaaatttttaatctatcttgagttaatgtttgtatatggtgaaagggaggggtccagttacattcttctgcatgtgacttgccagctatcccagcaccatttattgaatgggaagtcttttcctcattgcttgttattgtcaactttgttgaagatcagatggtggtaagtgtgtggctttatttctgggctctctattctattccattggtctgtgtgtctgtttttgtaccagtaccatgctgttttggttactgtagccctatagtatagtttgaagtcggataatgtgatgcctccagttttgttattttttcttaggattgctttgactattcaagctgttttggttccataagaattttaatatagttttttcaattttgtgaaaaatggttttggtagtttgataagaatagcattgcatctgtaggttgctttgggcagtatggccatttgaatgatattgattcttctaatccatgagcatggaatgtttttccatttgtttgtgtcatctatgatttctttgaagtgttttgtagttctccttgtaaagatctttcacctcctccattagatgtattcctaggtacttttttgtgtggttactataaatgggattgtgtttttggtttggctctcagcttggatgtattggtgtatggacatgctacggatatttgtacatttattttgtaccctgaaaccttgctaaaattgtttattagttctaatagctttttggtggagtccttagggttttctaagtatggaatcatattgtcagtaaagagagatagtttgacttcttcttttcctatttagatgacttttatttctttctcttgcctaattgctatggctagcacttccagtattatgttgaacagttgtggtgagagtggccatctttgtcttgttccagttctcaaggagaatgcttcaagttttttcatgttcagtatgatgttgttccctagcttcttgtggtttgctgccaatctttgatgttcctcggctcgtagacctctgcattcatcttcacacggcattctccctgtgtgcgtatctgtctttaaatgtcacctttttataaggacaccagttatactgtattaggagcccaccattctccagtatgacttcatcttagttattatacttaatcctatttctaaataaggtcacattctgagatactggggattaggacttcaacatatgaactgggagaagagacataatccaactcataagatttgctaaaaataaaaagaagaaaaggccgggtgcagtggctcacacctgtaatcccagcactttgggaggccaaggcaggtggatcacttgaggtcaggagttcaagactagcctgaccaacatggtgaaaccccatctctactaaaaaaaaaaaaaaaaaaaaatacaaaattagccaagcatagtggcacatgcacatgcctataatcccagctacttgggaggctgaggcaggagaatcgcttgaacccaggaggtggaggatgcagcaagctaagatcatgccattgtactccagcctgggcaacaagagcaaaactctgtttcaaaaaaaaaaagactctagtgagtggattcatagctgaagcaacatagtagcttatttctcacataacagaatcctaggtcagtgcatggctctactcctctcagtcactcagagacccaagtttcctgagtcttgtttcccacctatttcctaaacattgttcttgtttataagagcaaagctgtgaactctggattacaaaaaataataataatcagagtgcatagaggaggcaagcctattgtctggaaatgccacctacttttcacattccacactggattacacctagctgcaagagaggccaagaaatatgacattggaaccttggtccctaaataattgcgtgaagcagaatcgcatactgaactgaaactagagagaaaagtaaactttaaaatattgaattttggacctctcacttctttttactggagcttagacttttgtcctaacaaacgcagtaactggttccagaagtggggtacaccataaaaatagatggcatttgcttaatgacagggttgtgaggacgcagatatttcagactggaaagctgagtatcttccttaggccaaggcaaaacatttggtaaaacatggtcaaccaagttgctaggctgtgatttcgttattatagaaggggagaatggatttttgtagagagctagcagtccacattccatcctctagccaccaaatatataaaagcatgcttcttcccaccatggaatacctttatacccttcctggaagaaggcaatatcccatgttattgatgcatccagctcagagtccaaaatctctggctaaaacacagtcttcatcaggcaggtataagaaagatggggacttagtggtcaagaacttgaccaatatgcaaacagagatggaagaatccacagataaaagtccacaaagagttggagaaatcatctgaccctgatctctccaacagtgagtggtaaataggcttttcatttgaaaggctgaggtgggtggatcacctgaagtcaggagttcaagaccagcctgggcaacatgatgaaatcccgtctctactaaaaatacaaaaattagacaggttggccaggtgcagtggctcacgcctgtaatcctagcactttgggaagccaaggcaggtagatcatggggtcagtagttcgagatcagcctaaccaacatggtgaaaccccgtctctactaaaaatataaaaattaaccagccaaggtggcatgcgcctataatcccagtttcttgggaggctgaggcaggagaatcacttgaacccaggaggtggaggttgtggttatctgcgatcacgccactgcactccagcctgggcgacagtgcaagatgctgtctcaaaaaagaaaaattagccaggccatggtggcagatgtctgtattcctagctactcaggaagctgaggcaggagaattgcttgaactggggaggcagaggttgcagtgagccaagatcgcgccactgcactccagactgggcaacaaaagcaaaactgcatctcaaaaaaaatgagggagacagagaaggaaagaaggaaggaaggagagagagataaagaaagaaaaaggaaggaaggaaggaaagaaagaacaaaggaaggaaggaaggaagaaaaagaaagaagaaaaaaaagagaaagaaagaaagagaaaagaaaaaaggaaagaaagaaagagccagcactttgggaggccaaggcaggcagatcatgaggtcaggagttcaagaccagcctggccaatatggtgaaaccccgtctctactaaaaatacaaaaattagctgggtatggtggcgtgcacctgtagtcccagctactctggaggctgaggcagaagaatcgcttgaacccaggaggcggaggttgcagtgagccaagatcatgccactgcactccagcctgggcgacagagcaagaccctgtctcaaaaaaaaaaaaaacaaaaaggaaacttgagcatcctgggttttttgtattttcagagggtcttggaatctatcccctgtggataccgagggttgactgtgatttgggagtgtagagggatttcttattttaaaaaggaccccctaagccaaagaaggcagctttgaaggatgtcttaagattgtggtccttccttaaagaagtgattgtcaacaaggaggatgatttcactcgctcccagccccggggacatttggccgtgtccagaaacagttttgactgtggtgacgggatgggatactactggcatgtaacaggtagaggccaggaatgtggctcaacatcctccaatgcataggaaagtcttgtgctataaagaacaatccatgaggccgggcgcagtggctcatgcctgtaatcccaacacgttgggaggttgaggcgggaggattgcttgagcccaggaattcaagaccagcctgggcaacatggcaagaccccgactctgctaaaaaccaaaaaacttagctgggcatggtggtgcatgcctgtaatccatgcctgtagctactcgggaggctgaggcaggaggattgcttgagcccaggaggtcaaggctgcagtgagccatgattgcagtactgcactccagcctgggtgacagagcaagaccctgtctcaaaaaaaaaaaaaaaaaaaaaattattcaggcagcaaagagttaaggtatgccgtcccactctgcacctactttgaaaggtagctacaaaccaggcgcagtggctcatgcctgtaatcccagcactttgggaggccaaggcaggtggatcgtctaaggtcaggagttcgagaacagcctggccaacatggtgagaccccatctctactaaaaatacaaaaattagccaaacgtggtggcgggcccctgtaatcctgactactcaggaggctgaggcaggagaatcacgtgaactcaggagacagaggttgcaatgagccgagatcgtgccattgcactccagcctgggtgacaagagcaaaactccatctccaaaaaatattaaaaaattaaaaattaaaaattaaaaaattaaaaataaataaataaataaataaaaagtagctgcatttagctgggcatggaggatctcacctggaatcccagcacttgggaggccaaggtgggaggacagcttgaggggccaggagttcaagactagcctgggcaacatagcaagatcccacctctaccaaaaatgtaaaaattaattaaaaaaaaagagaaagaaataaaaattagccaggtgtggtggcacacacctgcagtcctagctacttgggaggctgaggcaggaggatcacttgagccaggagttggaggctgcaatgagctatgattgcatcactgaactccaccctgggcaacagagtgagaccctgtctctttaagaaaaaaagaaaagaaaagaaaagaaaggtagcagtaaaagtgagacctaaccaggccaaatctaggatcccaagagaaacaccttggtgacagttgtcatcccagagacacaagtagttgtcaagaactgtgaagagtctgggatcttatcctacttgcaagtggacaattgaacctgctacagttttatggatgtgggcagaagacacgagactccagtatcagagacaaaggactttattactcatggcacagcaggcagcatgaactttgtgtttgcactagcccacattgggttagttccacagccaaggaactctgagcttaaagatctcgatttttatagttgattgcaaacaaacctggtctattttaataccagagggagacattatctttattatatggatagcaaatgaaactgccctctgcttcacaggaagaaactctgtcttccaaggctgtttgctatacaaacatccttgaaaagatagctggaataaaagctgtctgagcccctgattttggggtgtacagaaatgcaagagacccgtggagaattgttctccaatgacaccattgacacctaatgggcagtggctgtccatgaaggtaactcaggtaggaggttgaataggggaggctgctcaggttatagtttgtgggtcaatgtgtagaatccggagtcagccactcttggttcaactcccaacaccaccacttcttagctgtgctggcttgagcaagttacttcacctctctgtgcctcaatttctccttttataaaatggaaatgacagcagcacttatctcacgaggttattgtgaaaattaagtgagctgatgtgtgcaaggcacgtagaacagcatggacacattaaagacatgtcagtgttaactataattattattaattatcgtgacgatgccaccaagcttgtggtcatgcctgttttacgggattaatggccaagctctctaacccacacagttccctcggagtgtggctcagagactttggggaggacttagagcccttttctccttgcccgccccaccaatggtttgccccttcccggataattttttttttttttaaacaggatcttgctctgtagcccaggcaggagtgcagtggtgcaatctcagctcattgcaacctctacctcccgggttcaagcaatacttgtcagcttcccaagtacctgggattacaggtgtgcatcacctatgcccggctaatttttttgtatttttagtagggacgggatgtcaccatgttggccaggctggtctcgaacttctagcctcaagggatccaaccccttggcctctcaaagtaccaggattacaggtgtgagccactacacctggtctagaaactctttttttattaagagatagagtctcactctgttgcccaggctggagtgcagtggtaccagcatggctcactgcagactcaaactcctgggctcaagtgatcctcctgcctcagcctctggagtagctgggactacagatgcatgccaccacacccagctaatttttaaattttttgtagagatggggtatcgctctgttgctcaggatgatcttgaactcctgggctcaagcaattctcccacctttgcctcccaaagtgctgcgactacaggcgtgagccactgcacccagcttcagggtcatttttattgtcatccttgtcatcttattactctattgtaccccatgaaatgaaactccatagagtgcaagctgagaacatttttgctcttttctattggaactcagtaaactcacctgttgccttggtctctttgcatgtctcaaactgcaggagacacatttgggggcagtccccatcctctcttctgttgtttgatctctgcagcctcaccacccaccacaccacaccacaccacatcctcacctctgcattcaacggcagacactctcacctgccctcagtcccttcctcctatgaccttcgcatagaccccatcaccaccgttcaggcctccctcaattgccacttcctcagggaggctttttcctgacttccacccaagactaatcaggtgcctgcattttgcatgcattaacatttttaggctgggcgtggtgactcatgcctgtaatcccagcactctgggaggccgaggtgggcagaccacctgaggtcaggagttcgagaccagcctggccaacatggtgaaaccctgtctttgcaaaaatacaaaaagtagccaggtgtggtggtgcatgcctgtaatcccagctacttgggaggctgaggcacgagaattgcttgaacctgggaggcggaggttgcagtgagccgagatcgtgccactgcactccagcctgggagtgcaggacagagcaagactatctcaaaaaaaaaaaaaaatttagctcacactctgggtgcctgcccagatccactgggttcctactgtttctctccacaccaaggggtacttctagcagcttcatctctctgctagggggagaggcggtcttcctccagctgctgaagtgagtgtgacccatacaagggcagatcagcacaatcaacagcccctaagagcagccttcaatcaacagcagcatggaattggtggataaataccccagctccttcgcccctcagctgggacaactccaaagagcatgctctctgctgcctccagaggccctcagtgggactgcaccctatttgtccatggcagtaactggtttcataatgcatgcttaatggttactttcttttccctatttcacttcccatcctctacttgtatctccttgggtcacttcccaaataaactatttgtccttgcattttttaagagatggggtatctgatgcccaggctgaagtgcagtggtgcaataatagctcacggcaggccaggcacaggggctcatgcctgtaatcccaatagtttgggaggccaaggcaggaagatcacttgaacccaggagttcaagaccagcctgggcaacatagcaagacgccacctctacaaaaacaaaaaagtatccaggcatagtggcacatgcccgtagtcctagctactcagcgggctgaggtgggaggatcaattgaagctgggggatctaggctgtagtgagccacgattgtgccactgcactccagcctgggcaacagagtgagaccttgtctcgagaaagaaagaaaagaaggaaagaaggaaagaaaggaaagaaggaaagaaggaaagaaggaaagaaagaaagaaagaaggaaggaaggaaggaaggaaggaaggaaggaaagaaagaaagaaagaaagaaagaaagaaagaaagaaagaaagaaagaaagaaagaaagagaaagaaagaaagaaagaaagaaagaaagaaagaaagaaagaaagaaagaaagaaggaaggaaggaaaggaagaaaggaagaaagaaagagaaagaaagaaagaaagaaagaaagaaagaaagaaagaaagaaagaaagaaaagaaaagaaagaaagaaaaaaagaagctcactgcagcctcaaactccagggcccaagtgattcaactaccttattctcctgagtagctgggacgacaggcacagaccaccatgcccagctagtttttgtatcttttgtagagatggggtcttgctatgctgcccaggctggcctcaaactcctgacctcaagtgatccttccacctcagcctcccaaagtgctgggattacaggcgtgagccattttgcctgacctccttgaacttttgtatcaaaagacagtcatttgccctattgtaattcattccataattgcagttattggttgtcttgccccactgggatgagtcatgtccaccacagtgttccaaaaacacgcacatggtagtagatgcttgataaatgactctgggtctcatgactgggaggtggctgggatgctgatgggctgttctctttcccccatcctgtccttagaagcccccagttggagaggttgtagtgcaggagggaagctcactcctgagctataaatggcagcctccacctgcctcatgctccagaatacacagcctgaacagctggggcagggcccccagcgtccgggaaccccaaatgaccctcccggccctgaccagggctcctggggtgttccctggagctcatgcccagaggggatgtaagtccattaccaaggctgcagacgacacactaaagatgctgatggggtcatgcagctagtcctagcgccattcctagcctgtgtctcccctcctccgcatcagactccacctctgggagctccctttgcaagaaaccgtaccagggacaagggtcttccctacaaggccatgaagcacgcagatatctcctgcgggaggaatctctttccgaggtcggtggtgtcaggcctggaattagccacaccacctgcggcgaggctggtcccagggtctctggggacacagcgggggacagcaggggtggagaggacatcaggactgacctctgatgactcagcctgagatagtgaagagaatgagaaatggtgggcatggaggcctggttgtggcagagcggggtgggtgagggagtcttaggacttcttgccagctcggtcctagagtcagctgggccactcacaagctgggtgactgtgggtgagtcactctgggcctcagtttccctatttgtaacacagggaggggcttataaccgcagctcattcctggagttcattgtaaaggcaaaggggcctacgttgcagctgcctcacctggctggatggcctctgacatagagggccagcctcaatttcctcctctgtaaaaatgggaataaaaggccaggcacagtggctcatgcctgtaaacccagcactttaggaggcaaaggtgggtggatcacatgaggtcaggagttggagtccagcctgaccaacatagcaaaaccccgtctctgctaaaaatacaaaaatttagccaggggtggtggcaggcacctgtagtcccagctactcgggaggctgagacaggagaatcacttgaacttgggaggcagaggttgcagtgagccaagatcatgccactgcactccagcttgggtgacagagcaagactctgtctcaaaaaaaaagaggggaataaaaacagtgcccccccctccagcttatggctcaaagtgggatctgtgagtcatctgctaggcttagtccatgaacagcatttcttcattatccacccagggtcctttcatcatgactgacgtccctcgagatgcaattattctggtctgcttttgtcacaggacgaaactgtctgtgtagcatgggggaggggtgggataagggaggaggatgaagaacggagttggggaggggtctgggcttggcccccttaactccggaacacagggagaagtcaatgtctttagcgcatgaaagaagttctagaatgttctatttgctaccttttcagcccctgcaccaacaggggtgaagttttcaccatgacaaagagaaggaagctggcttaatgaacagtgaggcagctgggagggggcagagggaagctggacactcttggcccgaacctacagtccccagtggcactgaccactacccatctcttccacgatcctgtttcctctacagccttgggcagaaaacaaggaggcctccctacctccacttcatcccacacaggagtcttgatgctgggtgggagtccaggagtctgtctaggaatccaggaaggcttcctagaggaggagccattgcatctgggccttgaaggatgaatagaagtttcctaggcagcgaagtgtgtgtgtgtgtgtgtgtgtgtgtgtgtgtgtgtttcattttaacaaacactttcctatcttctaggggccaggtactcagaagaccacagacaagacccagccccatggcctgccccaaagagttcacatctcataaatgatgcttgaataataacaataatagtaacagctcccacatgctgagtgtgcgctgctaggacacagcatgtgacaggaattcagtgcctgaatgaatgagccaataaattaaactttctctttaaaaaaaaaaattctttttgttttattcttttagctctactatctaaggaaggaaaaagctttctggagtcagcaaatcctgcccttgattgctggaggggagaacggaggcatagtagggtcaaggagatggacggcacaaaggcctgggggtgggaaaactggagtacaggggtccagtgtggagagagttgggggcagagtcttaagcggggagctaaggcactaaggccgtctcctgttctttgggaactggggagccacaccttgattcccagcacaagagggaggaaaggaagacctgagatctagagaggacagcaggagcctgccctgggctccaagagtttcagagatggcccagatcagttgattgagtggccttctccctgtcatgagccacaagcagtagaagccacaggggggcagaagagatggagagatggagagagacacagcgacagtcaccagaagagagacaggggcatggcagaaagaggtgggagaaatccaggaaggctccctgggggtggtggccggaaatagggtggaggcctaatccctgatactagagaggcaggacctagaggggaggagaaagcttgatgctaggcaggaagtccaaaagtctgtctaggaatccaggacggcttcctgaaggaggggccattggatctgggccttgaaagataaatagacgtttcctacatttcctaggcagagaaaagtgtgtgtgtgggcggtgggggaggggggaaacggggaattgctcattttacttaacaagtactttcccatttttaggggaccaggtactcagtgggccacagacaagaccaaggcagaaaagacaggcgcctccccacattgcagcaccgggaccccgagcccacccacagccctcttcattcctcccaacgatggatggggaaactgaggcagcccagagcagcccccaccctaggtcctgcccgggacacgcccacgcgggacctgtgtcaccaggttaaaaatggaaacagctaggaccttttttttttcttcctttaagaaaatcctaggtccaaataaggcgagggctgccgggagcacggtgagctggccaagtcctcctgagcaagcgagtggcggctggcccggccggcctgggcttgggcctcctccaagactcgcctggcaggagggcggaggcaccccgggaggctataaggccctctcctccaccctgccaggctcactctgccccacagccacagcccctgactgccgcagcccccacagagcccgccgcgcaccccacgtcccccacgccagcgcccagccatggaggccatcaagaagaaaatgcagatgctgaagttggacaaggagaatgccatcgaccgcgcggagcaggcggaggcggataagaaagccgctgaggacaagtgcaagcaggtgaggtgccctccgctgggccgctccgggctgctgggagtcctctctgtgcggaaggccggggtctggagcccagttgggggtcgcagacacctgcgggaggataggaggctgatgctttggcggaggaagagcgaggggaccattgccttccttggatggggtcctgggctggaagaggggtgacgatcggacccacccccagcagggccagtgcgaacaaagtgagtttgacagagagagagttggcgggggagggagagtgagaacgttcgtgagcgaggtgtcgtttgcgctgggaggttgtgtactagatagggcggttggggacatgctgtgtgtgtgtatttgcgtgtgtttgagcgtatgtgtgtgtacgtgtgtgtgtacgtgtgtgcgtgtttgcctctggtgtgtgtgtgcatgtgtgcgtgtgtgtgtgtgtgtgtgtgtgtttgagacagagtctcgctctgtggcccaggctggagtgcagtggcccaatctcggatcactgcaacctccgcctcctgcgttcaggcgattctcctgcctcagcctccgagtagctgggattacaggcacccaccatcacacccggctaattttgtatttttagtagagaccggatttcgccatgttggccggactggtctcaaactcctgacctcaagtgatccgcccgcgtctgcctcccaaagtgctgggattacaggcatgagccactgcgcccggccatttgtgtgtgtttgagcaattctctgtgtgtgtgcgtgagcatttctgtgtgtgtctgtgtgtgtatctgcatgtttgagcatttgtgtctgtgtgtacatgtattgtgtatgtttgagcgtgtgtctgtgtgtatctatgtgtttaagcatttctgcacatgtctgtgtgtgtacacatatttgtgtgtttgagcaattctctgtgcgtgtatctgtatgtgtttaagcatttctgcgtgtgtgtgtacacatatttgtgtgtgtgagagcagttctgtgtgtgtgtgagtgtatctgtgtgtgtttgagcctttctgtgtgtgcacatgtgttgtatgtgtctgttttacgtgtctatctgtacatgcacatatgtttcagctgaaaagagtgcggaggggtaaaggtgactgtgagaatgagtgtgtactaggagagctgtgtgtgggacgctgcgtgcggctgttggaaagtaggtgtgaaagagtgtgggtgtgtttgtgagcctgtgtgtagatggtgggggtctgtgagggtagcgggacaggctgactgtgtgtgtgcttgagcaaacgctggtatgacagtgattgaaagtacatgttgatgtggctatgtttgtgttggcatctgtgtatcagggtgatgggtttctgatggcgtgtgtgtgtgcacccacgcacatgtttggatgtgtgtttctgttgtgtgtattggtgactgtgcttctgttggggtgtgtgtgcatgtttagatgagtgtgtgtttctgttggtgtgtttatgtgtatgagtgtgtttctgttggtgtgtgtgaatgtgtatggatgagtgtgtgtttctgatggggtgtgtgtatggttgtgtgtttctattggtgtgtatgtgtgtggatgagtgtgtgtttctattggtgtgtgtgtatgagtgtgtgtttctgttggtgtgtatgtgtgtgaatgagtgtgtgtttctattggtgtgtgaatgtgtatggatgagtgtgtgtttctgatggggtgtgtgtatgattgtgtgtttctattggtgtgtatgtgtgttgtgtgtggatgagtgtgtgtttctattggtgtgtgtgtttctattggtgtgtgtggatgaatgtgtgtttctgttgctgtgtgtgtgtgggtgagtgtgtgtttctgttggtgtgtgtgtggatgagtgtgtgtttctgttggggtgtgtgtgtggataagtgtgtgtttttatggggttgcgtgtatgagtgtgtttctattggggggtgtgtgcatgtgtggatgagtgtgtgtttcgattggtgtgtgtgtgaatgagtgtgtgtttctgtcggggtgagtgtgtgtgtcagtgactgtttctgctggcgtgtgcatatggatgtgaggggggctgtgcgaacctgtgtgtgcgtgtaggtgacactatgcccctggatcaggaagcctccactgtgacagaagcccgctgtctcatgggcacctgcccaggagaatggcacggcatgtgtgtgtgtgtgtgtggtgggggcccagggctgtgacctgctgcaggggtgactgggtggggtctggggactgggatgggagtagagttgagagtgagtctgagaatctcattgtgtatgtgggggtgtccctgctaaaagcctggaggccggggcaggtgggctgcccgtggtggacggaggagagggaggccatttcccatctcctggcagccaagagcccacacagacccagaactttggagacaagagtcctgggaaccctggcaatgagaatgcattggagttccaaggccgtggccatggtttggggcagagcagacaggagcagtgggtgggaggaaggaagggagtcccctcccacagagccatgttccccacaatgtttatccacaccccgatgtcaactgccaagccctggggagcatccaggtctccgataaaccctgggagatgcctaggaccatggcaccgagtgcccagccccacccaggccaggagccaggccagcccggcagctaaaggcgaaagctcggagctcagactggccatgtttgagtcatggctcagtcgctaggtgtcccggacgcctgcatgagtgagatacggaagtgacagtagggcctcccttgccaccccatgacaggattagaggtgactgtacaggtggaacccttggcccggagcctagctcagagtaagcactcaataaatgtaggttgatttcctgccccgccctacttcccctttgggcctccccagccccccgtgccccagggctgccctaagagtatgtggcacattcgtgcaggccaagccccaccccagtgttccctgccacaagctctctccgccttctctgtgcccctccctggcaaacacagacattcatcctgtgctgggccagcttctagccatcatttagccctcaccatgagggacttagccagagattcggagagaaacaagtttatagcactaattcttactaaggtgtgagtggctatctcccaggacagccacaagttcaaaaaggaagaatcctcaaagcctccagccagctgcgtggccaaggaggttatgccttttttgtcccacaaagatgcccactggagtagacttgggctcaaagcaagtctacacagactagctttcaggcaaacctccatagactagcacatactttgtgtatatcagtctttaaatgtatttttattttttagagatgggggtctcactctgttgcccaggctggagtgcagtggtgcaatcacagcttactgcagcctcaaactcctagggctcaagcgatcctcccacctcagcctccccagtggaggtgcacacctccacgcccagctagttattttatttttagtagagacagggtctcactattgcccaggctagtcttgaactcctgggctcaagtgatccttccacctcaacctcccaaagtgctgggatcacagacttgagccacggagcctggtctttgtgactctcctagcttcatgactgaggacacgttcctgcacatttctgagccctcagtgtcctcatctgtgaaatgggaacacgtgaggccttctgaagttcaggtgtggaactcaagatcccagaattccgaagcagaagccagcgccccacaggagctaacggccagtcctgctggggaatagaggcacttagagcgcctgacgctgcaggaggccagagagagcagctctcgggccagcctgatcccagcagccaagcactgatttctggccctgcttacccagtgtgggaaaaggacaaagaggcccagcccggccgcttcctgcccactcccctcccagggcagcaacatcctccaccactggcctttgaccccacatcctgcctcagccctgccccaaggccccatttgcagggactaaggtaatcctatgacagatagggaaactgaggctcacagagggacaatgacgggcacgcgccaccaggcccggctaatttttgtatttttagtaaagacggggtttcaccatgttggtctggctggtctcaaactcctgacctcgtgatccgcccgcctcggcctcccgtagtgctggaattacaggcgtgagccactgcgcccagctctcatttattttttatcctcactgcctaccactgaagggtttggggttgtgtcttcgattcatcccaaacacttcctacagtgttctaatgctggggcccatagtggcctcagtcccagaactgaccctcaagaaactccaagctgagggagacagaccatgaatacctccagctcagaggtcagggccggaccagagggagggacagaggctgggacagctgtaggcgtggcgaaagctctgctcagggcagcagagcaggccaccagggttggggagccttgggactgagcatggagggacggtagatgccctcccagtgaaaagtagaaagtcattcttagcagtgggtccagcatggtctagaagtcaagcaaaccagctttggaatcagactaacaaagattcaaatcccccatctgtgtggcatcaggcaagtcccttcccctttcagagactcagtttgcccttctgtagtatggggcttccctgagacaatatttgtaacacgccctggccaggcatagtggctcacacctgtaatcccagcacttcaggaggctgaggtgggggatcacctgaggtcaggagttcgagaccagcctggcaaaaccctgtctctacaaaaaatacaaaaattaactgggcttggtggcatgagcctgtaatcccagctactagggaggttgaggcaggagaagcacttgagccagggaggtggaagttgcagtgagctgagatccagccactacactccagcctaggcaacagagcaagactctgtctcaaaaaatatatcaaaacaaattgtaacacgcccaacacattctaaatgccagatagccccctgtcggccttatccctgtcctcacatgttcttgcccaaacatttcccccaaaaaagtagtcaaaaccccaaaccaaacaaaaaaaccccaaaccagccaggtggggtggctcatgcctgttgtcccagctactcgggaggctgaagtgggaggatcccttgagcccaggagttcgagaccagcctggataacacagcgagatcctatctcaaaaaaacaaaaacaaaaacaaaacaaaacacccaaaccatcttcataccctgatgagtccatgctgtcagatttgctctcactcttcctacatgttaggagagtcctgtgttgggcacacagttggcacccaataaatgctgtgatccacagatctggaaggaagtcaggtggatgctgtaggtcagggttgacctatgaaacgtctttaaggaaactggctcattttctcagtcaaggcagaagttcaaaagcagctgccggaatgctcagagaccagcatgtcaaggtttctgttctgcagatggagaatctgaggccagaaaaggggacgggggtcgcagagcttggatttggagtcaggcttccaggctccccacccggaggtcaaggtcaggccctatagactctgaccctgccctgatcagctggccaccctggattgggccctgtcatctccccatagcttgggatgctcctgaggacttcagacaggatagccctccctgctctctgtcacatctcagctagagacccttgcaggtcacctcagtgacatcagctgaacctccagctgccagcctccaccccatcctccagctgacacccagcaggccgcaagatgggaagcctggagttcacactttccagctactcaggaggctgaggcgggaggatcgcttgagccgaggaggtcaaggctgcagtaagctatgatcacaccactgcactccagcctgggagacacaggaagaccatgtaaaaaaaaaaaaaaaaaaaaaacgcaaaaaaaaaaaataatgcacacacacacacagcaagatcaggttaaaaaaaaaaaaggcaaaaaaaaaacatacacacacacacacatatggggcacctggtacattttgcacatccactcaggggtgagcacgtagcccagacaggattcagagctcagtctagaagccacgggcacagcagcttttttaacataccctcttcaagaaaaaaaagaagagaagcaagtcagagagggaggaagggaagctggcctagtgtgaggaacagggccaagggctttgtctttgtcagctcaggcagttataacaaaacaccatagactgggtagcttcagtaatagacatttattgtttacagtctggaggctagatgtccaagatcaagatgctggcagattaaatgtctggtgagcgctctctagctagcttgcagacagccaccttcttgctgtgtcctcacattggaagaggataaccaagttctggcctcttctcataagggccttaatcccatcatggtgggtcaaccctcatgacctcacccaaacctcatcatcttccaaaggccccatcaccaattaccatcacatggagatgagggcttcaacacatgaattggagagggggcaaaagcaagcattcagttcattataggcttatattccagaagacctgggctcaaaccctgtgctgtgtgacctggggaaagtcatcccacctctctgagcctcctgctgtggggaggaagcaggagaatgaagctgggctcagtgggggctgtctgcccaccctgggagcaggaacaagatcagtgtcaaaccatctaaggcaaaagtcagatccaagccaggtgtggcgactcacgcctgcaatcccagcaatttgggaggccgaggcgggcagatcacttgaggtcaggagtttgagacctgcctggccaatattgcaaaaccctgtctctactgaaaatacaaaaattagtcagtcgtggtggtgtgcacctgtagtaccagctaccggggaggttgaggcaggagaatcacttgaacccaggaggcggaggttgcagtgagctgagatcgtgccactgcactccagccttggtgacagagcgagactctcaaaaaaaaaagtcagatccaggcatgagctggatatgatcaccctaatccagagttgggggcccagggagggagtttcagcctggaggtgacagaaaagtcttcttgagccaactctagaccggtgtggtggggggtgacaaagagaggtgatggggtctgtggtttgtaatccataggcctgagcttctcaaactaggagtgatgggaggataggactcttgggataaacagaggactgaaaatttagggaaagtaggggacatttttattaaaatgaacatggcctatatgcaaaaattttaaagatttaacccgagccttcaaagaaagtgatcctgtaggggcgagtctcttctagccaagctccccaaagcccagaaatgagggactaggtctgagcccttcagcccttcagagtattttggtaagacagtctaagaaccactgccttgggccatagggagccatagcaggttctaggcagaaagagggcaggcgtatttgttagaaagtttctctgaccccgtgttggggtcagaaccagagggagaaaggctggggacagggatgggcggagggatccacgcgcagagaatgagattgcttaactccagatcatggtgaggctgcacctctgaaactggaatgtgtgtatttctggaaaacatttggagtcttcagtttcccaaaagctgccattgatctccctagagtactggggaccccaataagcccaaaacagctggtcctcaggacgagggaaagatgtgaaaatcccactatcaggtagcatggatggcgtggtgcatgctatcgcaacccctgttctacagataaggaaactgatgcccagagagagacggaggactcttgtgaatattgggggggaccgcccctgcacctcggggacgtgaccccccccccaggctgacccgttcctcgctctgtcgtccccaggtggaggaggagctgacgcacctccagaagaaactaaaagggacagaggacgagctggataaatattccgaggacctgaaggacgcgcaggagaagctggagctcacggagaagaaggcctccgacgtacgtgtgcagggatgcgggagcccgcggcggggccaggccggagccccggggccgggaaggcggggagagccgcagggggaggaggaagaggaggaggagaaggcggcgcctcccagcgctttctccaaataagtcccgaaaaggggcactttccagcagctgtggccagcggtgccgacgtcaggccctcccccagcggtgctgacgtcggcggtccggccgggtgacctcatcgccccgacggcagccggcccggggggcggggagaggcgggggcggcccccgcgcaggcaaaggcttggggggccggggcgcggctgtgcagctctcgccggagccgagcccagccgagcgtccgccgctgcccgtgcgcctctgcgcctccgcgccatggccggcctcaactccctggaggcggtgaaacgcaagatccaggccctgcagcagcaggcggacgaggcggaagaccgcgcgcagggcctgcagcgggagctggacggcgagcgcgagcggcgcgagaaagtgagcgccccggcctcgggccccgcacccgcagcctcctcccccgcgcgccctcctttcttcccggcttcccgcgctgcccgcccgcgcgcagtcctcgggccgcctttttacgccctcggacgccgatcgccgacccacatccctgcgcccgcagccaggaccccctacttcctccgccgtcctccttcctgggcctgggacaggggagggggcgccgcctccgggtcgggcggggccggccaagcgggaaatggggggatggggcggagggggtgagcgatctccgggtggagaagtggagcggcgggagggggcgtatcgtgcaggctccgactccggggctggcgccggggtcccgggccgaggggaacccgcgaccggacttgtgggggagaatgaggatgaaaacgtggagcttccattgtctagggtttgaccggccgacagggatttcgacgggggaccggggatctggggagggggtcgcactttctcgcctctttcgcggcttcccggcttctgcttgcttccctgaccgttcccaggggcgcggcggcgacgtgtctgctccaggcggcgggggggatggggggtggaggaagttcagccccaagccgcccgcctttctccagctgattcctgcgggaaccggggcggcgggaccctgcctctctccagaaggccccgggaacgctggcgcggggccctgaacccacgatcgtttgagcgcctgctgtgcgcctccgccgcgagtcgcagggcccgagataaacaatgggtctgaaaaaggagggagtttcaccatcctctctgcatcatcctcctggctgtccctcgggacagatggtggcaccgccagggtctggggacagatttggattctggtcccatatcatgccacccacaggcttcatgacttggtatttgctctctaggagcttttttcccatctgcgagtaggactgataagaatcccgaccccccagagtagcagggagggtcccaggagtaaatctcaggcgtggagcctggcgctttgtaaataatcaattgtgttgttgttttttgttgttttgtttttgaggcagtctcactctgtcgcccaggctggagtgcagtggtgcgatctcggctcgctgcaacctccaccccccgagttcaagagattctcctgcttcagcctcccgagtagctgggattacaggtgcccgccaccacgcccagctaatttttttttttttattttggatttttagtagagacagtgtctcaccatgctggccaggctggtctcgaactcctgacctcgtgatctgcccaccttggcctcccaaagttctgggattacaagcgtgagccacggcgcccagcctcaattgtgttttctctgccctgggaagagctcatagacaaatggaggcaggggagctgactcactgatggagcgaggtctgcattccacgggttttctgtgcagttatgggagcatgacaggggaggctccaaaatggaggttgagctgggtcttatagaataaataagtttgctgggaccagagacatgggtgtgcacagactcagaggcaagaaagttgtatgatgagggtgggggggtgtgcggatagaggttgaagcccaaaagccctgaaagttcagtgttgaggctcagggtggggaccctagagaggcaaaagatgcccagccagatggaattggtggtgtgaattgccaggactggaaagagcccagatgggggctgcagcatgggccttggttgaagcctctaatcctgtaagggctgctttggcccaagaggccttagaaacccggtgtaagcctcaatcggtagccggtctggcctctttctcacacttaaccgacacagctcttgctctgatctcatcccaagtcatctcgctggaggacaattaactcggcttcaaaatggccctcagcctggagccaagatttaggagcaagaccgtctagttgggagagaagatgtttttggagagttgaagacttcttgaaaaagttcgaaaagttcttgaaaaagcaaaggatgcttctttccgtctgggagagggaaaacctctcccagggcaaaaggaactaagaccaggggtgggttaaaaaaaaaaaaaaaaaaacctttcactcttgtagaataagccaggagccggcgtgtggtagacttctgggcctgtttcccgacagctggtttcgtttagatttttgtgtgattaactgacatcttcctgttcctttgccacatgtatctagcaagcctcttttaccttataagggaaatcctttgtagcgtgtggaaggctttgattgcaggaaggggtggaacccaaaatgactcggccgtgactagcagtttttcaaaaatacatatatatgtatgcatgtacagatatgcgtgtatctcccaactccagacagctgaaaatctgccaaaagcgttgtttgccaggattcagaatttcccacataagggctactcacttcttaaaagacaactcatgaatcaagcacctctgtttgatctttaaaatcaattcctcgactgctaatgggtacacagttttttgtttgtttgtttgtctttggcgggttatgaaaatgtcctggaattcgataatggtgttggttgcagagtgtttttgcaacatcagttcctggcccagttactgaaggtggtaggaggagttaagatctaggcaattaaaaagaatgaaaggcacccattcatgggaaggcctcagtgacgtttcttaagacagtttcatcagtggttttcacaattctctgcatttggtgtttcagaggacactgcaatacgaaacacctgtgggagtgccctctttctgcttctaggaatctgaggctgagaaaccttcctgactctatttgtgtagtttttcggccacgttagcctcattctatttttttttcccccagtatgaactcagggcaggagagggagtggtttcctaataattttttttttttgagacggaatcttgctctgttacccaggctggagtgcagtggcgcgatctcggctcattgcaaccttcacctcccgggttcaagcgattctcctgcctcagcctcccaagtagctgggattacaggcgcctgcccccacacccaactgatttttttgtatttttagtagagatgcggtttcaccatgttggccaggctggtctcgaactcctgacctcatgtgatccacccacctccgcctcccaaagtgttaggattacggatgtgagccaccgcgcccggccttcctaataattttgatagccttccccagttcagggattcttcatttgttctgataggaaaaagctagcgtggcttcccttttcctctcggttgaggcccgtttgacccgttctcaatattccttccaaagagcaggcatcgctggaaaactcgccttgcctcgtagccctggcaggacctaggggacaggttctgacaaggaagagccctgggtgggtcttaagaggccattcatttcttaccaattctgagtcactgaataaaaccacttcccccagtggggcccctcggtttcttcacctgtaaaatgggtgcgatgtgtgaggatgaaattgcagtaaaataaaaccgtggcagtaagagatgcctttctctggcacatcccacctgctgggcataagcggcgccaccctctggagttacagcctcaaggcagtccggtaactaatcaggctttgggatggagagggccaggatgaggaagcaaccttcccaacaccacgtggctgtgaaaatgacaaagcacggtcgggcgcagtggctcacgcctgtaatcccagtactttgggagaccaaggcgggtggatcacgtgaggccaggagtttgagaccagcctgaccaacaagacgaaaccctgtctctactaaaaatacaaaaaaatagcaaggcgtggtggtgtccgtctgtaatcccagctactcaggaggctgaggcagaattgcttgaacccgggaggtagaagttgcagcaagccgagatcatgccattgcactccagccttggtgacggcgcaagactccatctcaaaaaaaaaattaaaaagaaaatgacaaagcggggattccagcccagcactttttggccctggagttcctggtttaatgcttcccattgtacttcctttcttgtaggtaaaaacaccttgaaaagccaataacactattggggtatgtcttccatgcctgcaaccaagttttctttccctttccatatctttttgtcctgccatctctcagccaggcggattgaaggatggaattccaacgaggctcccccgcctcgtcccaccttggtaattgcatggccaacatttaactgagggctccatagtcttgcatttatcttgccattcaggtgaatgggagcggaactcacaggacacaatgagccgggtcactgatggccttgctttctaagaatctcacagtgagccctagaactctctacgtggtaacactgtgtgcctttttcagagaagagcctatcttagatcttagcctaacgttgggtctattgtgttgctggagagaccagcactgacattcatctcaaagcacatggtatgtttgactcctatgttgactcaactacccatcttgtactgggacactcgctttttttttttttttttgagacggagtcttgctctgtcaccaggctggagtgcagtggcacgatctcagctcacggcaacctccgcctcccgggttcaagtgattcttctgcctcagcctcctgagcatgtggaactacaggcacgtgccaccacactcagctaatttttctatttttagtagagacagggtttcaccacgttggccaggatggtctcgatctcttgaccttgtgatacacccacctcagcctcccaaagtgctgggattacaggcatgagccaccacgcttggcgatgctcatcttttgctatggagtggtagatgtttttcccagacattttccgggaagatcatactgaaattttggtatgagtgtaaattccctatggcctggactcctgggtgggctttgacggggaagatcaggttaacagagggcaggacatgggggaggctcccactggtggctggcctgatacttcttaacatggctgcacctccgacctccccaggctgaaggtgatgtggccgccctcaaccgacgcatccagctcgttgaggaggagttggacagggctcaggaacgactggccacggccctgcagaagctggaggaggcagaaaaagctgcagatgagagtgagaggtaaggacgctttgaatctggtggcatccgtgtttgcttttagaaaatggggatcatgctgccgacctcgcagagctggtgtgaaagtaaacaaggtcacaaggacatgcatgtgtccacaaaaaagtgcatgacagcactttgtaaaccatcactccatgggtagagatgtttatccgtggccaggcacggtggctcatgcctgtaatcccagcactttgggaggccaaggcggacggatcacctgaggttgggagtttgagaccagcctggccaacatggtgaaaccccgtctttcctaaaagtacaaaaaaattagcctgccatggtggcgggcacctgtaatcccagctactcaggaggctgaggcaagagaatctcttgaacccaggaggcagaggctgcagtgagccgagatcgtgccattgcactccagcctgggcaacaagagcaaaactccatctcaaaataaagtgaggggtgtttatccttacggtaaccatgaaaagaaacttccgacagacagaaaggcaaacagaacgggcagatgtgagactgcaagtatgactgtccatggtggtcagtttgcaaagcactgcttctcgtattttctctgaaagccacagtgcctcttagtgttctctagacaccaaatttcaggtaggccggatgcagtgattcctgcctgtgctcccagcactttgggaggcagaggcgggcaaatcgcctgagctcaggagttcaagaccaactggggcaatgtggtgagaccctgtctctacaaaaaatacaaaaattagccgggtgtggtggtgcacgcctgtactcctggctactcaagaggctgaggtgggaggatcacttgaccccaagagtttgaagctgcagtgaggcaagattgtgccactgcactccagcctcagtgacagatgagattctgtctcaaaaaaaaaaaaaaaaaaaaaaaagcagagtactgtggagaggaggaaaggaaacttgggatgcacaggtgattgttagcagagctgtcaggctttaggcttttggacggtgacagctatttcagggacagttgcaaaccagcatggttaatgtacttgcaactgaccatgcaccaggtgccgtggctcacgcctataatcccagcactttgcgatgacgaggcgggtggatcaactgaggtcaggtgtttgagaccagactggccaacatggtgaaaccccgtctctattaaaaatacacaaattagctgggcgtggtggcgggcacctgtaatcccacctactcaggaggctaaggcaagatcccccagcttgaacccaggaggcagagggtgcagtgagccaagatcgcaccactgcactccagcctgggcaacagagtgagactctgtctcaaaaagaaactgaccacgttcctcacccgcccatggtatctgtgctgcaacccagccaccagtagggtgccttctcctcggtagccagatcattctctggcacgccttggcacaggctctctggaagactgagggtagattgtgtaattcacagaagcagcagtctgtgtgtggtggaaaaggagttccttgtgtggcaatggtgtgggcccgaccagtgatcatcgcgtctgcccctcattcacaccggagttctcacttgagccagccaccatgcttttgcagtataaacacctcccaaagattcatttctttttttttttttttttttgagacagggtcttactctatcacccaggctggaatgtagtggtgcgatcacagctcactgcagcctcgacctcctgggctcaagcgatcctcccgccacggcctccagagttccagagtaaagctgggactacaggcgcatgccatcatgcccagctaatttttttttgagacagagtctcgctctgtcgcccaggctggagtgcactggcgtgatctcagctcactacaagcttcacctcctgggttcacgacattctcctgcctcagcctcccaagtagctgggactacaggcacccgccaccacacccggctaatttttttgtatttttagtagagacagggtttcaccgtgttagccacgatgttctcaagctcctgaccttgtaatccacctgccttggcctcccaaagtgctggcacgcctagctaatttaagatgcatttctggttgtgctgctgtgaccactaaccagagattagaaaccagctaaggaatcttggagattgcatgtcacccaagctggaaatttcttcccaagtagtggaacagccagggcagagggaacagacgctactgcagactctgcttcagccactgaatcaagggagagagtggcagctccggcagccacggggcagtggaaggacccagtcacgagagttcctggctgtgcctgtggcctgggttagctgctgttcacagtcagaccagcctggctggatgctgacgttgagggctcccatattggcaaaccaagggaggctgcgaaggccagtctcttgtttgcaccatgtccccagaggcctttggtgacacccctgttaaagactgctgtgtctcagtagaaagaattatatacttgaagcttggggatctagagtcagcttctaccactggcactttctatggagccttaggcaagtcactttgatctcttgggtactacaaggggttttggggcaataaataacccagagagcttgctcacatgctgagggtgagacctcgtacaggtgggggagggtgttttgagacttagctgagaacgggtgacaccccacgtgaacatatttattggacagcaagaagcatatggtctctgtgctgggtgggaatgatacatatcaatgacacattatcccaggctggcctcttcttttcttttcttttcttgttttaaatacacaaggtcttggcagggtgcggtggctcacacctgtaatcccagccctttgggaggcgggcggatcgcttgagcccaggagtttgagaccagcctgcgcaacatagtgagaccccatctctacaaaaaaatattaaaaattagccaggcatggtagtgcatgctggtagtcccagccactcaagggactgaggtgggagaatcacctgatcccaggaaggcaaggttgcagtgagctatgattacaccactacactccagcctgggcaacagagtgagaacctgtctcaagaaaaaaaataaataaatacacaacgtcttgctctgtcacccaggctggagagcagtggtgcaatcacgactcaccgcagccttgaactcctgggctcaagcgatcctcctacctcagcaacattgcaaaacccccacctccacaaaaaatttttttttagtttagctgggtgcagtggtgcacacctatagtcccagctactcaggaggccgaggcaacaggattgcttgagcctgagaggacaaggctgccgtgagctctcagggcaccactgcactccaacctgggcaacagagtgagacaccatctctcaaaataaaagaaaaagaaagggggcacagactctggagtcagactgccaagggctgagcctcagctctaccacttaccagctctgtaaccttaagttacttaccctctctctatgccttagtttcttcatttgtaaaatgtggataatttacctgctccatagggcagttgtgaaagtgaaggcacttagaaaagtgcctggtagtaaagatgaagggaggctgggcgcggtggctcacacctgtaatcccagcactctgggaggtcaaggcgggcagatcacttgaggtcaggagttccagaccagcctggccaacatggcgaaaccccctctctactaaaaatataaaagttagccggtcacggtggtgcatgcctatagtcccggctatgctggaggctgagacaggagaattgcttgaacccaggagatggaggctgcagtgagctgagatcacactactgcactccagcctgggtgacagagcgagactccatctcaaaaaaaaaaaaaaaaaccaagatgaaggaaatgtgtgcacagagttccatctttgcagtgtgttacagtgctcagtagattcagagactcatttagatgagagatgggactaggggtggtgtctcacgcaattagccagacatggtgacgggtgcctgtaattccagctactcaggaggctgaggcaggagaatcgcttgaacccgggaggtggaggttgcagtgagctgagatcgtgccactgcactccagcctggatgacagagcgagactccatctgaaagaaaagatagatgagaggtgggtggaggggtgtgagtgaacggccgtcctgatgagattgctccttgcagaggaatgaaggtgatagaaaaccgggccatgaaggatgaggagaagatggagattcaggagatgcagctcaaagaggccaagcacattgcggaagaggctgaccgcaaatacgaggaggtgagtggggctggcagatggcgcagcagcaggaagtgggaggaaatgcatctgctgagatagggaggacaccggggccaacgaaaggaagctctcggttaggtcagctgtcctcctgcgtgaacatatgtttgtccagagacaaccacttggctaggaaactatctcccacgatgccagaaagtgctgcggacgcttgtctaacgtaatgggaaaaccgaatgatcagctcacttgtgtcgttagctgggagttttggcacagttgggcaaaaatggaggattgtggtcccaagccatggagtttcagaccatgcaagctcaggccctcctttgcctccctcgatggctcggctcttccctcccgcctcttgtctgcctcgctcctcaggcttgaggaagagaatcaggatttcctccaggccccaggatggctctttcagttgaagcgccagcaaaaggccaggcgcggtggctcgtacctgtaaccccagcacttcgaccgaggcgggaggatcacctgaggccaggagtttgagaccagcctgggcaacatagtgagaccccatttctaaaaataataataataataattagctgggtgtggtggcatgcacctgtagtcccagctacttgggaggctgaggcaggaggatcgcttgaacctgggaagtcaaggctgcagtgagctctgaccacgccactgcactccagccttggagacagagcaagaccctctgtcaaaaacataaaagggctgggcatggtggctcacgccggtaatcccagcactttgggaggccaaggcaggcagatcacctgaggtcaggagttcatgaccagcctggccaacgtggtgaaaccctgtctctacaaaaaatacaaaaattagccgggcatggtcgtgcatgcctgtaagcccagctatttggaaggctgagacaggagattcacttgaacccaggaggcagaggttgcagtgagtcaaggttgagccactgcatttcagcctgggtgatggagcgagactctgtctcaaaagaataaaaaaataaaaaagaggccaggtgtggtggctcatgcctataatcccagcactctgggaggccgaggtaggtggatcaggaggtcaggaattcgagaccagcctggccactacggtgaaaccccatctcgactgaaaatacaaaaattagctgggcgtggtggcacgcgcctgtagtcccagctacttggaaggctgaggcaggagaatcgcttgaacccaggaggtggaggttgcagtgagccgagactgtgccactgcactccagcctgggcaacagagggagactccgtccccctgcaaaaaaaagaaacaccagaaaaacccatgttgcagctggtctaggggtctgggtggggcatcattgggggctgtctgcagtggatgggagaggacacggctggtggggatcgggctcagctgggcctttctgtctctgcaggtagctcgtaagctggtcatcctggagggtgagctggagagggcagaggagcgtgcggaggtgtctgaactgtgagtggcagaacaggactgagcgaggctggctcgattcctggggcggagtgggaaggagctggctgtgttgggaattggctctgaccggggtctctgctcaagtggacgggcgtcaggggctcatggctcatcttttctcttggcttctgtgacaaagaggtggtgacttgttcttactgccatgggaagcactgcccacgtgttgaccctttctgcaaagatatgaggaaataggagtgagacaggaggcagcagggaagcccagaagtcccattttcccagagaggatatctcagggggctgtgccatcttaacagaacactgacctgctccagaaggcaggctcccccggtcagtatgtaaatgcttttgctcctgtcagtgtttggccgtgacacattcctggcgggaaggtgagaagcttaaccagaatcccacaagcaagcaccgaaaaacaaaacacctgtcctcttggccccgggtgaggaattcagccccacagagcatccgggagtgctgagagagatctggtttcacaaatccactccgggcttccttcccggagtgtcccctgcaaactcccattgctctctgcccgccttctgccctcagtcccattcttacaccttccggagtcggcctcatcaatcatagatttcacaagtccttgcagccttacccttggcaaaagaccaggagtgttttccaagccctccaaatactcttcgggcgcacctcgcctctgcctggtatgataagcctttgataagcccatagtatcacactgcagaaaaatccattaacattttctccccacattccttctgccccccaccgggggagctgtgtaggtttctcctttggaaaatttattgttggggcgattgctattattgccggctgtaagggaagataagacacaaaaatcctttgtctttgtgcagaaaatgtggtgacctggaagaagaactcaagaatgttactaacaatctgaaatctctggaggctgcatctgaaaaggtaggtggttggcttgagctggagggtggcttgctggactttgttcttttcttctcccgagggatgcaggagcctgtcaggttatggggaatctgccctttatttaacagtagcgttggtgcctggcagccagggtttttcccctacagaaagagctggatttctcctgcacactcttgagtcctcttccatggggtctgagcaccatctttgatctccatctcaggaggatagagatagaacatgaggctcttcttagcgagatctgagcatagttgtataaataaatacagagcctgcctctcacctgattcccctggttcctccagaaataccatctcaaaggtatagcaatgatcagaggtggaattgggctttttagtttgaaacagcacccaaagcagttgctacgtggcagctacgtcgggaacaaaggacacacttccacggccgaaccccactgaatttcccagcctcttcctcattcttgctcctgcttttgcagtttcacagacattctttgttctcccatcacctccaccccccacttttttttttttttttttgagacagagcttcgctctgttgcccaggctggaattcagtggcatgatcatagttcattgcagccttgaactcccaggctcaagcgatcctcccacctcagccaccacctgctattcactcaactgggtgtggctttccttttgcttgataaacccctattcagcctttttttttcttttctttttttttgagacagggtctcactctgtcacccaggctggagtgaagtggcgtgatctcagcttactgcagccttcgactcccaagttcaagcaattctcccacctcagcctcccgattacacgctaatttttataatttttggtagagatgaggtttcaccacattggccaggctggtctcgaactcctgatctcaagtgatctgcccgcctcgccctcccaaagtgctgggattacaggcatgacccactgcacctggcctagagatgagatcttgctctgttgcttaggctggaagtgtagtggcgtgatcatagctcactgcaggccccaaactcctgggcttaaataatcctatcacctcagcttcctgagtagctaggacttgcaggcatgtgccactactccaaaactgtatttttttttttttttttatagagcacagtctatgttgcctaggctggtcttaaactcctggcctcaagtgatcctcccaccttagcctcccaaagtgctgggattacaggcgtgggccaccgtgcctggctaatttttctagtttttggtagagacaaggtttcatcatgttggccaggctggtcttgaactcctggcctcaagtgatcctcccaccttggcctcccaaagtgctgggattactttgggaggccgccgagcctggcctcctgttcatcctttgagcttctgcttaaacatcacttctgagagtccttctctgatttctcatctaggttaggtatttctctgctgtgtagccctgtctatacttttgctggcattatgatttcttacatttattatagttactccattaattgcatgccttccttgctagattgtaagttgtaaggacaggaaccatgtcatcttgttcagagttgtgtccctagtactagcattgtgcctggcatatatctgtagtgtgtgtgtgtaattttttttttttttttttttttagtagagatggtgtttcaccatgttgcccaggctgatctcaaactcctggcctcgagtgatccacctgcctctgtctcccatatgtgccagccctggcatatatctgatactaggatgtgtaaggaatgaatccagttggtgtgtgtatgccagacactgccccgggccagggggatagatgtaacaccactaatacctcagctgctttgttttgttttgttttgagatggagccttgctctgtcgcccaggctggagtgcagaggcacgatctcagctcactgcaacctccacctcctaggctcaagcaattctcctgcctcagcctcctgagtaactgggaatacaggcgcacacaccacgcccagctaatttttgtatttttagtagagacggagtttcaccatgttggccaggctcgtctcaaactcctgacctcaagtgatccacccacctcggcctcccaaagggctgggattacaggtgtgagccactgtgcccagcctggcatctgctcttgaagagctcagagtcgagtctagtggaagggattgacaaagtcacagagtgctttgggaatacaatagagggaccttggtaggttgtgaacggtgtcaccaaggaggcgacatttaaaacagctgtaggtccagcacggtggctcatgcctgtaattccagcactttaggaagccgaggcgggaggatcgcttgagctcagaagttcgagaccagcctgggcaacatggagagatcccgtctctaccaaaaatacaaaaactagctgggcatggtggtgcatgcttgtgatcctagctacttgggaggctgaggtgagaggatcacttgagcctggagggcggaggttgcattgagccaagattgccccactgcactccagagtcaggcttcagtcatgacttgatcacttaatagccatgtgaccctaggcaaaataataacttcacctttctgtgaccctttcctcccctataaaatgggattacagataccaggctgtgatgccattaactatgtctggcccatggtaagcagctaataagtgttagttattattgggaggccgaggcaggcggatcacctgaggtcaggagttcgagagcagcctggctggccatcgtagcgaaaccccatctctgctaaaaataacaaaaattagctgggcatggtggtgggcgcctgtaggcccagctacttgggaggctgagtcaggggaattgcttcagcctgggaggcagaagttgcaagtcacagtgagccgagatcgtaccactgcactccagcctgggtgacagagcaagattctgtctgaaaaaaaaaaaaaagaaaagaaaagtataatttctgatgggtcatcatggggaggggaacattccatgctaaggggtgcattcatggacagggactgggactcaggagtccacagattatgatcagggagtgcctgtcaccctggggaaggtggtggagaatggggttggaaatacagagggggccttgagtaacagattcccagttatctccctttcttcgccatactttttatctcaagttctcagtttaggccttctgatcaataccatcctacaggactctccccaacatcctccacatttcacacatatttcttctgctggggaaaggtgcctgcctctactctgcctacttttttttttttttctttttgagatggagtctcactccatcgccccaggctggagtgcggtggcgccatctggcctcactacagcctccacctcctgggtttaagcaattctcatgccttagcctcctgagtagctgagattacaggcacccaccaccacacctggctaatttttgtatttttagtaaagacagcgtttcgccatgttggccaggctggtctcgaactcctgacctcaagcgatccacccgccttggcctcccagagtactgggattacaggcgtgagccaccgtgcctggcctgcttacttctttttatgcttcttcctccttttttttgagatggggtcctgccctgttgcccaggctagagtgtagtggtccaatcagagctctctgcagccttgaattccagggttcaagccatcttccctcctcagcgtccccattagctgggactacaggtgctcaccaccatgactggctaatttttaaattctttgtagagacggggtctcactatgtgacccaggttggtctcaaattcctgggctcaagtaattctcccaccatggtcccccaaaacactggaatcacaggtgagagccaccacacccagccctccttttctttctttctgttttttttttgtttttgttgttgttgttgtttgtttttttgagatggagtcttactctgtcacccaggctggagtgcagtggcgtgatctcggctcactgcaacctccacctcccaggttcgagtgagtcttctgcctcatcctccccagtagctgggactacagctgcatgccaccaagcctggctaatttttgtatttttagtagagacggggtttcaccatgttggccaggctggtctcgaactcctgaccttgtgatccaccagcctcaggctcccaaagtgccaggattccaggcatgagccaccatgcctggctgggcctccttttcttaaagcagtgttttggtttctcccacagtattctgaaaaggaggacaaatatgaagaagaaattaaacttctgtctgacaaactgaaagaggtgagtgtggtggcacccagcgagctctggtttctcctggggctggtcttgaagccatgatagtaactcctttcttcttatctaggctgagacccgtgctgaatttgcagagagaacggttgcaaaactggaaaagacaattgatgacctggaaggtatgaggttaccatctaaatgtttgccttgccctgccttcccctctgggacacatccacggacagttggggaatgtttgtggaggggctgggttgggctttgtttgccttaggaaagtaaagcgcatagtgatgtcatatctggatgtcctggaacactggaataggataatgcaaagcattcaggcttgaatggcccttttttttttttttttttttttctatgagacggagtctggctctgtctcccaggctggatggagtgcagtggcgccatctcggctcactgcaacctgcgcctcccgggttcaagtgattctcctgcctcagcctcccaggtagctgggactacaggcgtgtgccgccacacctggctaattgaattgccactttcaggaggtaaaatatctctgcttagttagtcccatgagcaagtatagagaaaagagtatggctctctctgattaaaaaaatattaataataaattaaaaatctcaggccaggcgcagtggctcaagcctgtaatcctagcactttgggaggccgaggcgggcggatcacttgaaatcaggagtttgagactaacctggccaacatggtgaaaccccgtctctaccaaaaatagaaaaaattagccaggcgtggtggtgcacgcctgtaatcctagctactggggaggctgaggcagggagaatcccttgaacctgggaggcggaggttgcagtaagccaagatcacgccacagctctccagcctgggtgacagagccagactccgtctcaaaaaaaaaaaaacttcacaatttccttctgtttgctcatttctgatagatgccttgcattttttttttacatgccttgcatttttgcagaagctctgtcccagggagctcaaagcttatcatagtatttaaaaaaaaaaacagaaatacagaaagtgtagggactgcaataaagactagtctgcaagtctggggcccacttctcccagaattttttcaagagttccagtgtttaacattcggcctcagaaattccagaatcttggggttcaaatggaatcttccaaactgcccatcccacccagaaaggacacattcttcagaccatatcttccaatgtttttttggggaagtgaggttcccatataagggaaaatgccccattccaaaatacgacctttggacagggtgacgtcattggaaatccgaaataaactgaggggtggggaccagtggggggaagctctgtcacttctggttaccactgttttgaagcttcattgtggctaatccccctgcagaacctcaaaccacttagagatcaactccatagatctttggttttcttcatctgtttcacatggaacacagctttctcctagtctgtgctttgtttgctcacgtgtttttttcttcctcttgtggttcatctgtggcactccattccgacccttgccttctgtcccctgtacttctgaactgtctccctggggacctccgccctctagatgagttatacgctcagaagctcaagtacaaagctatcagcgaggaactggaccacgctctcaacgacatgacctctctctgagaggcagccaggtcgctgccctctgtccttctcacatggtgcctcctacgcccctgtgggcttctaggagctccggtggcctgccttctggtttgaacgtcagagccttcttctgatgtgtctgtgactctacaaccgaaataaagacgggcagtcctcctcttcatgccccctcattctcattttctccacttgctgcctttgagctgtagctgtgtgcccttaaccatagcctgaaacacaaagtgggtggttagcctctctcactcacaaatgaaaagcttattacaaaaagaaaattatgcctacaggatgcttttctgaagacgtgaaaacaaaagcaaactgggcatgtgctctcagataccgctgttagctaacggcatctgcatgccaataatttttttttgtttttttgttttgagacagggtcttgctttgtcacccaggctggagtgcagtgacaccatcatagttcactgcaacctccacctacaaggctcaagctatcctcccacctcgacctcccaagtagctggaactacaggtgtgcaccaccacacaaggctaatttttgtactttttttttttttttttgaggcggagtctcactatgtcgcccaggctggagtgcagtggtgcaatctcggctcactgcaacctccgcctcccgggttcaagcaattctcctgcctcagcctcccaagtagctgagattacaggcatacaccaccacacctggctaatttttcttttggatttttagtagagacagggtttcaccatgttggtcaggctggtctcaaactcctgaccttgtgatccgcctgccttggcctcccaaagtgcagggattacaggcttgagccatcacgcctggccatttttgtactttttgtagaagcgggagggtttcactatgttgcccaggctggtcttgaactgctgggctcaggcagtctgcccacctcaccctcccagggtgctgcaattacaggcatgagccaccgcgcccatccccaatggtttttccttaaatagaaattgttgtgaatggaggctcatccttgtaaaccgcttaggcagcttaagagtcaacagggatttggaaaaaccagcaagcctgtgtcaaaaatgaggctccccttgaatggggcttgagctacagattcaaacagcggcagtgacattttgatctccatttcctccttttcttgtgtcttttctctgtgttacactgtgagtgtggtgactggggcttcccgtggctttactcttcactgttcatccagctcccagtcctgggaggaagttcacctccacgccctgcccttagaaaactgactgtacaaggagtgaacgggcctccatgaacagggaaagtgctgtgacgtcagaagacgtgaatttagaattcttttcccgaattccagaattgcctgagactgctaacatcaatctccattcatatttcagttagttataacaggaaccttgctttagtttagaatagctcttaaggttgacctgtgggtaataaaaggtcatgctttttcctacatgaggaatatggagaaaacaaggtcactcttttttttttttttttttttttttttttttttttcaagacagggtctcactctgttgcccgggctggagtgcagtggcgccatcttggctcactgcaacctccgcctcctgggttcaagtgattctcatgcctcagcctcccgagtagctgggattacagtcgcggaccaccacactcagctaatttttgtactttcagtagagatggggtttcaccatgttagctaggctggtctgaaactcctggcctcaactgatccgcccacctcagcttccaaaaatgctgggattacaggcgtgagccactttgcccggcccaggctatgctttgcttttttttttcttctttctttttgagacggagtttcgctcttgttgcccacgctggagtgcagtggcgccatctctgctcactgcaacctctgcctcacgggttcaagcaattctcctgcctcagcctcccaagtagctgggactacaggcatgcgccaccatgcctggctaattttgtatttttagtagagacagggtttcaccatgttggccaggctggttttgaacccctgacctcaggtgatccacccgcctcggcctcccaaagtgctgggattacaggtgtgagccactgcacctggcccaagctatgcttttctaatgatcaaaaacataccaatttgtcccaaaatttcaaatagtgcatctggttctcccctgcatcctaccaccactaccacctcaaattatcacagataattgacatttagatgttcaagccacatcttccagactaccccttgaacctggaaatggcatgaaaatctccaactagatcctgaattttcggtatccattgttattcctcatcctatttttttgtccaggtgggaagctctgtccccattactctctctattcatccattcctccaaaatgcacctcccctaaaccacctccacctttccaccctcagcctctccctgctcctaactgccgtccatcctgaacttctgcaaaaaccattcccctcacacattgccatatatatgcccttggaaagattacagactgtgtagggggctggtttttgtttggagtctgtgtgtttgtccctggaatttctccaggcatttctggactccaccctttgaagtaactatgcagcctgtctatccagttattctacctaactaagcacataagtggaatttcagagattagtgctatggccgggcacggtggctcacgcctgtaatcccaacactttgggaggccaaggcaggcaggtcacttgaggtcagaagttcaggaccaacctggtcaacatggtgaaactctgtctctactaaaaatgcaaaaattagccgggcatggtcatgggggcctgtaatcccagctactggggaggctgaggtgggaaaatcaatcacttgaacctgggaggcggagcttgctgtgagccaaggtcgaacctttgtactccagcctgggcgacagagtgagactccgcctcaaaaaaaaagaaaagaaaagaaaagagattagcactatggaggtctacactatctgttgatagtctgtgagccttgtcgtgattctcaagggcagttaacactttcagggaaagtcattttatctcagacctaataacaaaatagatgctaaagcatctgagtgacaagatgaagcgaagtcaggatttgtagtcaagagaccagggtttaaggcctggcgcagtggctcacacttgtaatcccagcactttgggaggccaaggcaggcggatcacttgagctcaggagtttgagaccaatctgggcaatatggcaagaccccatctctaaaattattcataataatattttatttttaaaaaattttttaataaaataataaataaagagaccaggatttaaaatcctagctctactactttaaccatgccaacgtgaacaagctgcttaggttttctgcaaaataaaggtgatatctctgttatgaggattaaatgagataatggagaaactggctcgtccaacatagtcagcattcagttaacatctattcacccagactggataggcccaggtcactgatctgtctgatagaatcctcccaggtcatagtcacttgactctgtgtgtgtgtgtgtgtgtgtgtgtgtgtgatggagtcccactctgtcacccaggctggagggcagtgacgcaatctcggctcactgcagtgtccgcctcccgggttcaagtgattctcctgcctcagcctcctgtgtagctgggattacaggtgtgcgccaccacacccggctaattttttgtatttttaagtagagatggggtttcgccatgttggccaggctggtctcgaactccttacatcaaggatccatggtgtctcatgccagtaatcccagcactttgggaggccgaggtgggtggattgcatgagaccagcttgggcaacatggcgaaaccccatctctactaaaaatacaagaattggctgggtgtagtggcacgcacttgtagtcccagctacttgggaggctgaggtagaaggatcacttgagcccaggaggtcaaggctgcagtgagctatgatcatgccactgcactccagcctgggcaacagagcaagaccctgtttaaaaataaataaataagaaaggctgccatcttctgcagtcatttttttctttctgtaaatttccaggctgatgatatcacattttatgaggcattttgctttcccccagcattttaatgagtcttggccttgtcccttatcagccatcacttactgcaaactaagttctctctcgtgctctgtcacgcatagctctaaatggcgtcttttttctctctctctttcttttttaatttaaattgtttcatcagctcagttacttaataacatgcctgtagaatggcttaaatttcgcatttacctggggtttgtctccgttctcctggattcatagacagttacacaattatgtgtataatttaaacagccattcccagaagctccgaaggaaagatgggttacaggattttagatttaactatcaaaggctcaggggctaattaactagcacttgggtggaaatttatattaagtcacacatatctaggactgaaatcttcatgtagcagcacgtcataggttctgaagtatttctcctttattcctcatcataacccccacaccacgcattgatatcgttacccccatttgacagacggggaaaacagacctaggaaggttagatgcttacttaagtgatacaactggagcttaagttcaggtattctgactcaagggttaccagagttcacaaggaaaaatacaggacaccaacttaaatctgagtttcagataagcaatgaataattttttaatcataagtatatctcttgcataagtacatctcatgcaacatttgggatatacttacactaaaatattatttgtggtttatctgaaattcaatttaactgggcgccctgcattttatcttacaactgtgactcccaaatttggtgcttgttccttagtattctgtgatgttctgctgtaattaaaaatacaaagtactggacaggcatggtggctataacccacctgtattcccagcactttgggaggctgagcagatgggttccttgagcccaggagctcaagaccagcctgggtaacatggtgagaccctgtctctagaaaaaatgcaaaaattggccaggtggtggcatgcacctgcagtcccagctatgcgggaggctgaggtgggaggatcacctgagcccagggaggtcaaggctacggtgattcgtgattacgccactgcacttcagcctggacaacagagtgagaccctgtctcaaaaaaaaagtactttctctcttgtgactttcaccctggcagtttcaggtttagaaatctttgggggggtgctgggcatggtggctcacacctgtaatcccagcactttaggaggccaaggtgggtggatcacttgaggtcaagagctcgagaccagcctggctaacatggtgaaaccccatctctactaaaaatacaaaaattagccgggtggtggtggcacgcgtctgtaatcccagctactcgggaggctgaggcaggagaattgcttgagcctggcaggtgaaggttgcagtgagccaagatcgcgccactgcactccagcctgggtgacagaatgagaccctgtctcaagaagaagaaaaaaaaacaaatctttttttttctttcatttaacaaagacgcttattaatttatctttccccatactcttaatcctcaccagagaaacttgcccaggccaaagaagagaacgtgggcttacatcagacactggatcagacactaaacgaacttaactgtatataagcaaaacagaagagtcttgttccaacagaaactctggagctccgtgggtctttctcttctcttgtaagaagttccttttgttattgccatcttcgctttgctggaaatgtcaagcaaattatgaatacatgaccaaatattttgtatcggagaagctttgagcaccagttaaatctcattccttccctttttttttcaaatggcaccagctttttcagctctcttattttttccttaagtagcatttattcctaaggtaggcagggtatttcctagtaagcatactttcttaagacggaggccatttggttcctgggagaataggcagccccacactttgaagaatacagaccccagtatctagtcgtggatataattaaaacgctgaagaccataaccttttgggtcaactgttggtcaaactataggagagaccagggaccatcacatgggtagggattttccatccagagccaataaaaggactggtgggggccgggggtggctattgtgggaagtcataacccacagatagatcaacctaagaatcctggcccttctccactctccaccatgcaggacaaacatcttctcaagcagtcaacgtagaatgcttgggaaatagtcataattacccacatatagtaattaatagatggtaattaattgatccttgatgtgatgttcttttgcatatttccttcattctaaagttgttccctggccgggagcgttggctttcgcctgtaatcccaacactttgggaggccaggacagatcacttgaggtcaggagttcgagaccagcccagccaacatggcgaaaccatgtctctactaaaaatacaaaaattatggtgacgcctgcctgtagtcccagctactcgggaggctgaggcaggaggatcgcttgaacccaggaagtggagactgcagtgagccgatatcgcaccacagcgctccagcctggtcgacagagtgagactccatctcaagaaaaaataaaaataaagttgttctctgaagagcaaatgtctcattccagtaatgacccactcagcaggaatatggtggagttcagtccaattcaggtcagccatatccaaaagaccacaagtcattactaagttgagcaaaagagtttttatctattagcagaaagggcctctctggcagcagagattaaaaactggcccaacttcatttccatacttcagggaacagcaaattgaggatttacttatctaggacttgaattccttctttgggaccaagttaataaaagaccaagaaactcctgattaaactggataatgaaggattctgtagacagggctgcacgtatcggctttgtttgacttctcttttctcagttaacatctcagagctagaacattccacattccccagcagcgtgtgggggctgactaaagtttacaattccaactaaaaatcaccctgcttctggcttatctgaatcccttacccaccccaccccaccaccctactcctatttattcagcaccacactacccaggaaatacactagcaaattgtgcaatggaataaaatccacactttagattcttgcaactgtatcatatgtaatagtatcactttttctacattttggtcaaataaatttttacataaactacaatttgcgtgaattttagaatgtgtgggggtacacagagcattttggttcaacaaatgttaaagggatggaaagggaaaataaccagagccaagaatgtagacaaggttatctatttgctttatactgtgacttcatgatacaaggatattacagtctcattgcaggcgagagcactcagcctcggtcactcgaaaactcctggccttccttatcccctacgctgcctaagccaggctgtgaagaatgagtaggattttaagagataaaagcagggaaaatcatctctgttgcctgagttaggaagatctgcctagctaaggctgagttacacatacaaaggaaagcagaccagcatgggcaccatagtgagaccccgtctacaaacaataacaaaaatttggccaggtacagtggccaaattacacctgtaatcccagcactttgggaggccgaggctggcggaccgcttagggccaggagttcaggaccagcctggccaacattgtgaaaccccatctctactaaaaacacaaaaatgagctgggcatggtggtgcacacctataatcccagctacccgggaggcggaggttgcagtgagccgagatcacgccactgcactccagccccggtgacagagcgggactctgtctcaaacacacacacacaaactagtggggtgtggtggcacatgcctataagtcccagctactcgagaggctgaggaagaaggatcgcttgagcccaggaggcagaggatgcagtgagctatgattggcctgtgcactccagcctgggggaccgtctctgagcaagaccctgtctcaaaataagtaaataaataaagcaaagcagaagcagaaaagctggaaggtaggctgagcccacactgatgacagcctgaacttaatttagtcaggagtggagagccactaaagactagaggaggccaggtgcggtggctcacacctgtaatcccagcactttgggaggctgaggcaggtggatcatttgagctcaggagttcaagactggcctgggcaacatggtgaaaccccgtttctactaaaaatacaaaaattagctgggtgcacacctgtaatcccagcactttgggaggctgaggcaggtggatcatttgagctcaggagttcaagactggcctgggcaacatggtgaaaccccgtctctactaaaaatacaaaaattagcgggtgcacacctgtaatcccagctactcaggaggctgaggcaggagaatcacttgaacccaggaggtagaggttgcagtgagctgagatcatgccactgcccttcagcctaggcaacagagcaagactcttgtctccaaaaataaaaaataaagactaaaaagactggaagaggccaggtgcagtggctcccacctgtaatcccagcactttgagaggccgagatgggcagatcacgaggtcaggagattgagaccatcctggctaacagggtgaaaccccatctctactaaaaatacaaaaaattaaccgggcatggtggcacgcacctgtaatcccagctactcgggaggctgaggcaggagaatcgcttgaacccaggaggcggaggttgcagtgagccaagatcacaccactgcactccagactgggccacagagcaagactccacctaaaaaaaaaaaaaaagactggaggaaacaagtcaagcaatacattaggaaaatccacttagcattcatcttcaagaaggtctagcattggggtggactaaggcaggaagcccagttaggaaaaggtttcaataatccagtacaggttgccatggaatacgagggaagaagtgattcgaaggaagtaatcttaaaatttagctcgctggatggcagagaacttagaacagaatgtcaaagaccactacagtttcactacctgaattttgatattttgcctcaagatcttcttttgaggaggggaggcagtgaatcagaaagagaaatgaaagcctttaaaacattaatggagtctgcagacaactttctgttatcgaaaaaataacaagccgggcgctgtggctcacacttgtaatcccagcactttgggaagccaaggtgggcagatcatctgaggtcacagacaggcagatcacctgaggtcaggagttggagaccaccctggccgacatggtgaaaccctgtctctactaaaaatacaaaaattagccaggcgtggtggcacacgtctgtaatcccagctacttgggaggctgagacaggagaattgcttgaacccaagaggcagaggtggcagtgaaccaagattgcgccactgcactccagcttgggcaacagatcaagactctgtctcaaaaataaaataacaggccgggcacggtggctcacgcttgtaatcccagccctttgggaggccaaggcgggcggatcatctgaggttgggagttcgagaccagcctgaccaatatggagaaaccccatctctaccaaaaatacaaaattagccaggtgtggtggcgcatgcctgtgatcccagctactcgggaggctgaggcaggagaatcgcttgaacctgggaggcggaggttgccgtgagctgagatcctgccactgcactccagccttggcaacaagagcaaaactctgtctcaaaaaaaacagcaggcagagacaggggaggataacgagcccagccaggggttcaagacctgcttgggcaatatagcgagatcccattctccaaaaataaattaataaaaaataaataactggctgagcacggtggctgacatctgtaatcccaacattttgggaggccgaggtgggcagatcacttgaattcaggagtttgagaccagcctggccaacatggtgaaaccccgtctccactaaaaatataaaaattagctgagtgtggtagtgggtgcctataatcagctactcaggaggctgaggcaggagaatcatttgaacctgggaggtggaagctgcagtgagctgagatcgcgccactgcaatccagcctgagtgacagactctgtctttaaataaataaataaaataaataaccgaaaatgtagttataataaaagtatacaattaaagcatttcctttaggccaatccaacctttaatgggcactgggctgattcagatggttggtgcagagaatgtgaatgaataaagtcacaccctccaataaaggccctgccatgatttgaccacagttcctcctttgtgtgtctgtttctccctcctccctccccacttgggttgtaatctcatctcgggatgctgttttagtcatgcttatggcctcagcacttcacacttcactgtgttcaacggacctgtcccaacttttggggagttcccaatgccatgaagtatggctggaacacagcatgaggtcagaaccagactgtgagggatttcaaacgctaagaggaagattttggactttatcctgcccagagaccacagatggctattaaaggaagtggtttttttgtttgtttgtttgtttgttttgctttttgagacaggattccactcttgtcacccaggctggagggcagtggcgtgatcatggctcacagcagcctcgacctcctgggctcaagcaatcctcccatctccacctcccgagtagctgggacgacagatgtgtacccagctaatttttgtatttttaatagagacagggtttcgccatgttgcccaggctggtctgaaatgccagacctcaagtaacctggttgcctcagcctccccaagtgctgggattacaggcatgagccaccgtgcccagcctaaagtattttagaataagcacactgcagggtggaatctgggttagagaaaatggtcagggagaccagtggagaaatgtaatgattccactgtggcaatggaaatggaagaatgcaattcaagagctatttgtttttttattttttatttttgagacagagtcttgctctgtcacccaggctggagtgcagtggtgcaatcttggctcattgcaacctccgcctcccggattcaagccattctcctgcatcagcctcctgagtagctggaattacagatgcccaccacacccggctaatttttttaatttttaggaaaaacggggttttaccatgttacccaggctggtctcaaatttctaactcaggtgatccacccacctcggcctcccaaagtgctgggattacaggcatgagccaccgcgcccggccctcaagagctatttagaacctccttaaaaaccagaatgtgacggatgagagatgaaaggcagatgtcaaagacagcttaagtttcactcctaaggaaaatcaggacaagccagtctgggtattggctgatgggttcagttgtgaacatgctgagctaggagtatctgacaaatccaaagggagatgtcctgaacgcaggtggatgtgaagagatggctgggctaaggataaaacactgagaatggtcagcatggattaggagcccccagaaagtgagaacagagacagaacaacgaggaccacaaacactaagggacaggcagaacccacccctcccccacctcaaaaagacttcaatggggtctgaggaaaaaacaaacaaacaaagaaggggaggcagaggcagaggtggtagggagaagaaaccagcaaataaaatagggacagggccgggcacagtggcttatgcctgtgatcccagcactttgaggggatcacttgatgtcaggagttcaagaccagcctggccaacatggtgaaaccctgtctctactaaaaataacaaaaattagccgagcgtggtggcacgtgcctgtaatcccagatactcgggaggctgaggcagaagaatcgcttgaacccggcgggcagaggttgcagtgagccgagatcatgccactttactccggcctgggtgaaagagcgagactccatctcaaaaaaaaaaaaaagggggataggggccaagcgtggtggctcacacctgtaatcccagcactttgggaggccgaagtgggcagatcacctgagctcaggagttcgagaccagcctggccaatgtggtgaaatcccatctctactaaaaatacaaaaattagccagatgtggtggtgggcccctgtaatcccagctacttaggaggctgagacaggagaatcactggaacccgggaggcagaggttgcagtgagctgagatcgtgccactgcactccggcctaggcaacaaagagtgaaactccatctcaaaaaaaaaaataataatggtatagggccaggcatggtggctcatacctgtgatcccagctttttgggaggtggaggctggaggatctcttgagcccaggagtttgagaccagcctgggcaacatagggagaccccatttctacaaaaaataaaaaaattagcctgccatagtagcgtgcagatgtagtcccagctacttgggaggctgaggtgggaggatggcttgagcccaggaattccagaccagcctgggtaacatagcaagaccccatctctacaaaaaataaaaattagccatgcgtggtggtgcatgccagtagttccagctactctggaggctgaggtgggagaatcactggagcctgggaggcggaggttgcagtgagtgaaatcacaccattgctctccagcctgggccacagaacaagaccctgtctcaaaaataagtaaataaatgaggataataccaagaaaaaagaatattcagaggtgatcaagactatcaaataccacagaggctgaggcctgtaggtggtcaatgcctctggttgaagcttttttaaccagagctagattagcagaagaatgagctgaagtggaagggaggaggaaaggctgggccctccttccacagatccttaagtaagcctcaaggccccggaggccccagagtgacctagaacagactggaccatctctaagaagcagggagccctagtgatcaaactgcggcctgggaagcttggcactctgagttcagataccaaattcccacttttaagcaggaagggggaaaagtcacttaacctcctctggcttcagttttctcaccattaaacaggaaaaaaacaataacatcgttttgctgggctggtactgggattaaaattttaagagtcaggggccgggtgcaggggctcacgcctgtaatcccagtactttgggaggtggaggcaggcggatcacgaggtcaggagttcgagaccagcctggccaacacagtgaaaccccatctctactaaaaatacaaaaaaatacaccacaccaggcgtggtggtgggtgcctggaatccaagctacttgggaggctgaggcaggagaatcgcctgaacccgggaggcagaggttgcagtgagccaagatcgcgccattgcactccagccctggtgaccgtgagagactccatctcagaaaaaaaaaaaagtcagggtcttgctccgtcgcccaggctggagtgcaatggtgcgatcacagctcactgctgccttgacctcctgggctcaagggatcctcccaccttagcctcctgagtagctgggactacaagcatacaccaccatacctggctaattttttaaaaaaattttttgttttttgagatggagccttgctctgtcacccaggctggaatgcagtgacacaatctcggctcactgcaacctccgcctcccagattcaagcaattctggtgcctcagccgcctgagtagctgggactacaggcgcacatgaccacacctgcctagtttctgtatttttagcagagatggtgttttaccatgttggccaggctggtctggaactcctgacctcaggtgatccacctgccttggcctcccaaagtgctgggattacaggtgtgaaccacctcgcctggccaaaaaacttttttttttttgcagagatggaggtcttgctatgttgcccaggctggtctccacctcctggcctccaatgaacctccacctcagcctcccaaagtgctgggattacaagcgtgcaccatgacgcccagctaattttatttgttgtagagatggggatctccctatcttgtccgggctggtcttgacctcctaagctcaagcaatcctcctgcctcccaaagtgctgactcccaaagtgctgggattacaggcctgagccaccacacccagctgcaagcccgattttccaaatgtatctctcctctgtttttctctttctttttttttttttttttttttttgagacgtagtctcattctgtcgcccagactggagtgcagtggcgcgatctcggttcactgcaggctccgcctcccgggttcacaccattctcctgcctcagcctcccgagtagctgggactacaggcgcccgccactactcccgggtaattttttgtgtttttagtagagacggggtttcaccgcgttagccaggatggtctcgatctcctgacctcctgatccgcccgcctcggcctcccaaagtgcgggattacaggcctgagccaccgcgcccagcctttttttcttttgatagggtcttgctctgtcgcccaggccgaattgcagtggggcgatcacggcttactgcaccctcaacctcctggcttcccaaagcactgggatcacagacgggagccaacgccccggccagttttttcaacgttgagagccctggcccctagataggacccagcatcctcactgctctaacccctccccccccaccatccccgggctggcccggacaacccctaaggtggccgagggcgggccctgaggaggccggcgcgcgcttccgggcacagcttgtggcggtgaagccgctcagatggcggaggccttgggtatctctaagcagatcgctaggccgcagacctcggagctcgtcttgggtcacttttatttattttttttgagacggagtctctctctgtcgcccacgctgcagtgcaatggcgcgatctcggctcactgcaagctccgcctcccagattcaagcaattctctgcctcagcctcccgagtggctgggattacaggcgcccgccaccacgcccggctaatttttgtatttttagtagaaacggggtttcaccatcttggccaggctggtcttgaactcctgacctcgtgatccacgcgcctcggcttcccaaagtgtgggaattaaaggcgtgaaccaccgcgtccggcttgggtcacttttcgagtatacagctcctcctctctccttcctccctaggcccccactgccccgactcgcaggccgcagacaaggctgagagcgctaccttgctttcccgcgctcgcctcggtgcctactgcgcctgcgcgagctgtgagggcgggacccagagacacccgccccaactactggcgtgcgccctctgctgtcgcctaacggaactccgggcgcgcgtgcgcacgcaccccaagccacgccccgccaggctgccggcgcgcgagcggttggcgccgctccctgccttccctctcctacagtggggcggggccgggccgcccgagtcgggggtggaaggcgggggccacataatgccacgcccccgcctcgtccccatttgaagccccgcgactcttcactgctggtcaatcagagcccgtgctctccctagtgccggccaatgggaggtgcgctcgggctgcttccggctccgcgctccgctcgccccctcccaaggtctccccgcgactggcgggacgcaggggcgggcgtcggccgcggtgacgcgcagcgggcctggagccaataaggggcgggctcggtgctgatggacggtgctggtggccagtggagaggcgctggccgcacttcccgtcggggagagagtgtaatatggcgaagacctacgattacctgttcaagctgctgctgatcggggactcgggggtggggaagacctgtgtcctgttccgcttctccgaggacgccttcaactccacttttatctccaccataggtaacgggaccggggaatggctgggggcgccggaggcccgggctgggcgcgcccctgaggggctggggctgagggatctacagggctggacgggccgagggcgctgagagggtcgagggggcctaaagggagaagagcagtcgcctgcaccgccgttcgggggttcctgggccgtggtgggggagaccaggtgcccattttgcagatagggagactgaggctccgaccctcagcccgctcgttagggcgtgttatgtcttgggctggggtcttcgcgcccgtcctctcgatctgtcctagcagcagccctcgaagcggttcttttgaggctcttgccttacagaagtggaaactgagtcatggggaattggccatgggaaaaagacagtggcatctcaccttaatgagcatttactatgtgccaagtgcttcacgtgcattttcacactcttcagttcttggtgttaagtgctgttatgagcccgtctgacaagatgaggaatctgaggctcagggagggcatggaacttgcccaaggccacacagtctgcacgtggtgagaatgggatttgatggaatttgaacctggctgtgtctcaacccaaaactcgaggcttagctctcctagagagatgccactgcacactcccagctgatgacaagctcagctaatgcaccttggagccgggactctaacccacaccattcctgctcttttctctggagcgttcagaggttgagcccctctccctgaccatgcttcccctcataagcgtattttcctctagaaggaatgataagaagagtcaggaccttttccctgcccacctttcatcctgctccaggaatgacagcaatggcaagtgacagcactgcctgccctgggacctgtcatccccaagaagatgcaagataaaagcctcagcgagaaactaaatcagccactgccacagacagccttgacttccctatcaaagggcccaagactccagctgtcactttagaacagcttttcctgtagggccagcccacattgtggttgaacagaattggcttggtgcatctcagttgtgatgtccacagaagtggagctgacctctctcagtgccacaaaagcagtcctggcccacaatgaaaaggtttgacccaggagtaacacctatttgagtggcttgtgagctctgtagccctgctagggatggggaaagtgggggaacggtcactaagtccaggagtttattccgactcaagaaaacctagggaatggcctttgctttactgtgtcactttgacagaatcgtgttatctccctgaaccccaagataatgtgctaattccattcttgccctcctccaggagctatgctttatttattttattttattttattttttgagacggagtctagctcttttgcccaggctggaatccagcggcaggatctcgggtcactacaacctctgcctcccgggttcaagcaattctcctgcctcagcctccctagtagctgggattataggcacccgccaccacgtccagctaatttttgtatttttagtaaatacagggtttcactgtgttggtcaggctggtctcgaactcctgaccttgtgatctgcctgccttggcatcccaaagtgctgggattacaagcatgagccaccgcacccagcggagctgtgctttataaaacagttatatgccagatgtaaaatagagagaattgactggaaatcattacgtctggtttccagttgctgtttgcccttgaatgtgcactacccctctctgagccctgctgtctttagagcaggagtgacactgtctgcccagcctagtgccctggtggttgaggattagaattagacaataaggggttgtcaccacaaccagaggctatctagaggaagcaaatgaatggctcctgcagtgacagcatccagcctctgaagacagatgtttctgaattcttccccctcccccactccaaggctaaactttagggtaattcttgtgctccaaccaatcaagaagtggcgttaattcagcctgggcaacatggcaaaccccatctctacaaaaaataaaataaaatcagccgggcacagtggctcacccatgtagacccagccacttgggaggccaaggtgggaggatcgattgagcccaggaggtcaaggtgcagtgagctgtgatggtgtcactgcactccagcctgggcaacagagcgagaccctgtcttaaaaaataataataaaaataaaagaaagaaagaaatgatgttaactgtgagcagactggcttgcattcactcagatcccagtttcccagccttccccacaaacccccctctttttttttttttttttttgagacagtctctctttgtcacccagtctggagtgcagtggcgcgatctcggctcactgcaacttccacctcccaggttccagcgattctcctgtctcagcctcccaagtagctgggattacaagcacctgccaccatgcccagctaatttttgtatttttttttttttttttttagtagagatggggtttcaccatgttggccaggctggtctcgaactcctgacctcgtgaccgcccaccttggcctcccaaagtgctgggattacaagcatgagccaccgcgcccagcccaacccccctctttagagttactttgagctttaaagaggctttcttccatttgcagatgaggatgtgacttggtgaaagttacctagcaaggtggaggtggcacctgaccctaagatccctccctcccaccccttcattcccctccttccatttgtagccttctgtcttctaggaaagtctaattcaccatgaccttgaaggtcagacctcataattcttaggcctcataaagtttacacttcctaattaaatttggcatgttaataaaacccagaggagtgtagggcggagtgctgctgtggagcttggccaacctaacagtgctcctcgattttttgtgtccctgtacacgtgtgacaggaaatggggaatgttttaggaagcccaggcacactgggctgtctagtcctgaagcagtatcaccttaatgcttaaaggtgattccataaattagccatacgtggtggcgcttgcctgtattcccagctactcaggaggctgaggcaggagaatcgcttgaatccaggaggcagaggttgcagtgagccaagattgtgccagtgcactccagcctgggcaacagagcaaaactctgtctccaaaaaaaaaaagaagcaattctatattggctgagtgtacctctgggttttctttatagacaaggattgagtggctattcattttctgccactcaatccttaacattttgccaaaagttacatttcatcaaagcctattctcagaagccccatagatcatttgtggtgtgaacttggccctgtagctccctggaatgggttctcaccagcctggctcggcgccactgcctcctcaggggcccattgattcctccagtgaaagggttggcatttgagaaagtgctttgtgaaccgctcaacaccgcgtagaccctgttgcgctttaatactttgatccagccatattttgccagtgtcttctgtgggccaggcagccattttggcaagagggctgcagaaaggacacaggtgagtcaaggtgcgtgcaggactggggtaccagcttctagcaaatgtgtattcaacccctgtgtgttcagtcactggaggtaatagcagtggatgagacttgtcagttccctgccccagggagcttacgtttgagagggcgaaagtccagtgctggggctggatggatggaattagcatccccaccctgggttcagagaggcccagccaggcctgggcctcaagtcttccccagcaggcacttgaacaaactcctggtggcaaaggctgggtctggctgtttctcatctacatgggccattatgatctgcaagcattatgcccaggtccatgcagcagatacatacatgtatgtcagttatgttaataaataggtaaagggagaactgatgaggatggtcagaaaggttcccctgaggagggaacttgaatgggaacctgaacaaagggatagccaggtagctacagaagaaagaactttccagggcagggaagagcaaacatcaaagccccgagtcaggagcatgcttggaatgttgaggaaatcgctgtgtggatggtgtggccagagagagcaggtcatgagccagagtgctgagaggtgaccaggttaggcaggaccttgacacacatgagcagctgtttccactttattcgagggaagtggggcagggaagccactgaaagaggctttaaaaaaaaatagctttatgagatagaattcgcatacagttcacccatttgcagtgtacaattcagtggctttgggtacattcacagagttccacaaccatcaccacaggcaatttgggaacatttttattatgccaaaaagacaccaacccaaggccaggcacgcacggtggcacagtggctcacgcctgtaatcccagtactttgggaggctgaggtgggcagatcacgaggtcaagagatcgagaacagcctggccaacatggtgaaaccctgtctctactaaaaatagaaaaattagctgggcatggtggcgcgtgccggcagtcccagctacttgggaggctgtggcaggagaatcacttgaacccgggaggcagaggttgcagtgagccaagattgcaccactgcactccaggctagccaagatcgcaccactgcactccaggctagccaagatcgcaccactgcactccagcctggtgacagagaaactccatctcaaaaaaaaaaaaaaaaaggataccaacccttccagtttccccatgtgcccccccagccccagacaactgctaatcagctttctgtttctatgaatgagcctatgctggacatgtctgttaatggaatctcacactaagtgacctttagtgtctggcttctctcagcatcctgtcttcaaggttcatccacattgtatagcatggatgagtactccgttcctttttatgactgggtcatattctgttgtatggttggaccacattttgttcatccattcatctgttggtggacatactagaaagtttggagcagagggccgggtgcggtggctgatgcctataatcccagcactttgggaggctgaggcaggcagatcatttgaggtcaggagtttgagaccagcctggccaacacggtgaaaccccatctctactaaaaactcaaaaattggccgggcattgtggcaggcacctgtggtcccagctactcgggaggctgaggcaggagaatcacttgaacctgggagacagaggctgcagtgagccaagattgtgccactgcactccagcctgggcgacagagcgagactccatctcaaaaaaaaaaaaagaaagtaagtttggagcagaggttagctgtgtaacatggttagggttatatttttgaaggctggggaggggactgcgggtgaacagtgggagcctggggaacatcaaggtggctgcgaggtcaccgtggggaaaggggatgaaagcgggaggtgagagacaaggaagatggggtcaggaaggcttgttaggaggtgatcttcaagggggccttaaaggaggagaagtgtgcctagctgacgggccagtgggacacagaccacccgcagaaaatgaatagcatgtacaaaagctgggggcaggagagaacgtgaccatgtgcattgacgcatggtggggcctaaggccctgtgtgcctgggggttggtcagctgcagggtgttggggagcaagggactcaggcctgcagagggctctgttgagacccactccgtacaactgcctggggtggggaggcgggttcagctggcagcaagggacaagagcagggctttgccacccgcgccccctgggtttgctctgcactgctcccatcagctcttggagagggaaaatatctccaagtgtttccagatctggatattccgacatcctgcatgcccagcaccaggcagggtctccgtaagccacaacagctgtcacctgcacaggttggtggcgcccagctcagacacaacttgggaaatgggctgacagtgacgtgccttttttcttttttctttcaggaattgactttaaaattaggaccatagagctcgatggcaagagaattaaactgcagatatggtaagagtcattgttctctgtcattctctccacctggcaatggcttcaagccagaagcccttggccttctccctccaccgtccctgtgaccttggcctccatttcttggtgcccagtcctggcacatggggctttctccagaagctcctggaggtttatacccagcccagagagctgtcctctgctggctgcagggcaccagggcctacagcatcataggcacaaagctgcccagccctggctagctcagtgttccacagtgggcaccatctgggtctggccttcagagtgggctgcttctgttgaacgggaagagagccctctcagtgccaggtgctggtgacgcctgcagggactgtgagatgccccagccgagagtttccttttgagcctctcaacccactcagaagcataaaggtccaacttcacttcctcttttctcccctggggcaggcctggcctcccttcctagcgtacagaccgaaaccccaaaccgaaattaagcggagggccgggccccatgttgagacctgtttccattcctgagaactaagggtgacttcccatgcacatacaattagggaagtggggagactccaagtcgccatcgctggcctgattctagtttgctgagactgagttcaggtggcgggtatagtggggtcctgccctgcacacatgccactcgcacagagtcactggccctgagcaaaacaaagagaagtcacatttaagagcatggtgcaatttccctgtcacccaaaccaggcaagtgcctttgagtgggagcagtgtgccaggagatgggccacgaagtcatcctccctcaagtctcaaagtttgaccggtcacccccacttgccagtttcagggagccccacagctacccttgactccaggtgctattcacctcttctttttttttcttctttttttgagacggagtttcgctcttgtcgcctaggctggagtgcaatggcgcgatcttgtctcaccgcaacctctgccccccgggttcaagtgattctcctgcctcagcctcccaagtagctggtattacaggcatgcaccaccacgcccaactaattttgtatttttagtagagacggggtttctccatgttggtcaggctggtctccaactcccgacctcaggtgacccacccacctcggcctcccaaagtgctgggattataggcgtgagccaccacgcccggccctactgttcacctcttaatctgactttgggagtcgggtaggtttaacttgcagttcatcctgcagacattggtagtaagtcaagctctggctgccttgtaagttccaagccatggaagtttctccacttccagcacgttggtgccatgtcaccctttgttcccaagtccaaagtgacactgcatcagcaagcagaagtttcactttcctcctgccttcctgcttctgctcttagcaatcgtggtgaggttagtgactcaaaactcttctaaggactgtagttgaaaaaaaaatgactggtttttttttttgtttctttgtttttttgagacagagttttgctcttgttgcccaggctggagtgcagtggcacgattttggctcactgcaacctccgcctcctgggttcaggcaattcttctgcctcggcctcccaagtagctgggattacaggtgcctgccaccacgctcggctaattttgtatttttagtagagacggggtttcgccatgttggccaggttggcttcgaacccctgaattcaggtgatccacccgcctcggcctcccaaagtgctggaattacaggcgtgagccaccgcacctggcaaaaatgactgtttttaaccactcatgtctcctgctgctggtgtcagaaagtcagcttagctccaagcaaggtgtttctgcacaatccagacgtatagagccctccgggtcccagcagggccgtgggaggaaccctgggcttggagacaaaagacctgagtcttgccctggctctgtcaccaatcagttaggtcacctttaatttttttttttttttttttgacaaagtctcactctgtcacccaggctggagtgcagtggcatgatctcagctcactgcaacctccacttccttggttcaagcaattctcgtgcttcagcttcccgagtagctgggattacaggcacctgccaccatgcctggctaacttttgtatttttagtagacagggtttcaccatgttggtcaggctgatctcaaactcctgacctcaggtgatctgctggcctcagcctcccaaagtgctgagattacgggagtgagccaacacgcctggcttttttttttttttttcctgagacagagtcttactctgtcacccatgctggaatatagcggcacgatctcaggtcactgcaacctccacctcccaggttcaagcgattgttgtgtctcggcctcctaagtagctgggactacagatccacgccatcatgcccgcctaatttttgtatttttagtagagatgaggtttcattgtgttggtcaggccggtctcgaactcctggcctcaggtgatccacccgcctcggcctcttaaagtgctgggattacagatgtaagccactgcaccaggccagttaggttaccttttttttttttgagacggagtcttgctctgtcacccaggctggagtacagtggtgcaatctcggctcactgcagcctccacctcctgggttccagcagttctcctgcctcagcctcccaggtagctgggattacaggcacgtgccaccatgcctggctaatttttgtattttttgtagggacggggtttcaccaagttggccaggctggtctcaacctcctgacctcaggtggtccacctgcctcggcctcccaaagtgctaggattacagatgtgagccactgcgcccggccagttaggttacctacctttaaaccaaacactaagtacccttcaagccaggagctggactgggcatgggtatgtcttacccaggcatcacctcccgggcaataggccctgtgttccttgtcatgcagatgaggagggactttccccatcattcaaaccaagatggcaggcctgaaagcttttcctgagtcccagccaccctcaacagcaagagctatgttcctgagccacatgactggctcttctgtgaaccagaaactccagggagaattccctggaagcaaaggtgcagaagaggagaaggcgcatgggtcagggatcccatcatggctctgccacatcaaatgacccctccaggccacagtgtccttccctgtaataatagggagattagaaggtgctgccttagcagaagaaggtatcacagtggctgaacggtgagaaagccaggcatcccgggtagatgctccttgtctcctactgaggacagttattttcctttaatgttgctaatatcccttctcttcatgtttagggacacagccggtcaggaacggtttcggacgatcacaacggcctactacaggggtgcaatggtagggactttttgtttggttgtttttatctgctttttaagtcaacatgggagcgtcactgtgcattggttaccgaagcctagatgtttctgtggagcccgtgccccaactcctcagggctccttggtcccaagttagtcttaggaacaggctttgtgccccggcctacccccatgtacatacctccccttctggctgcagagacaatgcaaggtttaaataaagtggaaacataattctttgggaatgaagaaagacacaggaagccggttcttccaggtgagctcagtgcagttaaagccggcatgccccgacttttaggagctgtcacatgacctgcatctgtctctgaaatttgctaccaaaagcttgaagatcttccaggagctgacctgccctgggctgtcggccgttatatccgtcacccaggcctgaggcgggatgacgtgatgggaagactcagtcatcatccctcaaaacatttctcaagcaccttctctgggccaggccttaactagatgcagaaggcggccagggatgggacgaggtcctgtgtcaggggccctgtgtgtacatggcagggcattcaggggtagagggagcaggaggtggagcccctggacctgacctgagaccctggcttgcccactgagctccatctcctgacttggaaaagggaacggagcacagcactgtgtctcgggctgtgctgaggataaacggctgcctctccccattcccaggtccctctgctccccactctttcctccgcataccccatcatttaattgctcaggcagctgcctgtttcctcgatgagggcagcgccacatcctggtccctgccatctgcctggccccggggaacctgctgggtctgcagtagttgctcaggaaagacttgtggagggtggagatggaaggaggcattatgtgtttagagcatcccacacggcatccgaaacctcatggcaacccactcgtgtgggctgcagccttagtgtgcctcagtaaaattaatgtatttctttccccccacctcacagttctctggtggagggtgggcaggcggcctgagggcactggggtcttggggagcttcagcctctggagaaaactgtgacctggggcctgtcccgatcttctctgggcccaaatagccaccttccaccctgccctgaccaccaagccctcccctgcaccaggcagtgggcccaggtcttagctcagattatctcattgcattttggctgtgaacctctttgtgcaggcgccattgtcatccctgttttataacaaagaacctgaggtttggcccggtggcctgccccgctgaagttcactcagcaggtaaatggctaggctgggctgggctgtttgtctctagcacccacatcctcaaccagcaccaagatgatcgtggctttccatcctcctagacccaggccaacctgaacagatgccaccactggctgcatgtggctatttgaatttacccaattaacattgaaaatccagccaggcgcagtggctgatgcctgtaatcccagcactttgggaggccgaggtgggtagatctcttgaggtcaggagttggagaccagcctggccacatggtaaaattccatctctactaaaaatacaaaaattagctgggcgtggtggcggatgcctgtaatcccagctactcaggagggtgaggcaggagaatcgcttaaacctgggagccggaggttgcggtgagccgaggttgcaccactgcactccagtctgggcagcagagcaagtatccgtcgcttaactacttaattaattaattaattttaaaaaacattgaaaatccagctccttgggtcaaagcagctatgtttctgatgccctagagccttgtgtagccagtatcagtcatatgggacagcaccaccattgcagctgtgtcctcatctctgtcagcatgctcatagacccttgggcctcaaaatcccaagtttgggaagcattggatgcctagagacccatggtgaggtttgcccagacggggccctggaaaatagtcacttggagccctgaggggtgtttccaggaaaacctggaataggatggctggctcagtgttttccaggtgcttctgcttgattctaagagagagctctacccactgccccactaacgtccaggttctcccctcagctccctgaaataggtataatccaggaatttgagtcttaggcacatgtcaccaacttagtggtgaaggcaggaatcctgggctttcagagggtccagtccccggataaagggccccacgccccctgtccctgaccatgtcacagtcacagggtgtgcccaccgtggatggggcatggcagacatcatgggccactgcagccttgaggttcttcgccatggttgcggctgactgtgaggccattattcatgtccctgaattcccaggaggatttggggttgcagtgactttcttgccccatctgtgtcgtttttgtcccacactcttgcacccacatctgtctcaccattaccacatggcccgtgtccttattctgcaaacttggatggccccagacaacttggccagcagcagaagtcatcagtgccctcaggtgccacagatgcagggctgggcctggggagcaggtagcgaggaggaaggaagaaatccaggcctggccatgagcaggccacgtgccttggagcccaggatgcccggcaacaaagggggacttgtgatggcactgcaggctggcccgctgtgggcactccacaaggacatcgagaaccacacagaccgtcagagggtggcccccacatgtgggttctggggctgaaaaaggcccagggatattgctgagaggataggtgtcatcagtgcttttggagttagcccccccccgccccccgtgcttgaatcttaaaggtcacgtctctgtgcctcagtttccccttgcatcgcatgggcatgtttgcgcttgtccacagcagtagcgaggctgtggacccaggctgaggcggggctgccccgaagctcttccaggacccacgagccgtctcccagttgctcacgtctaggttagggaactggaagggccttggcactctcggctccatcttcacacagccggttccctctgtggtggggtcactggaagttgtgtggatgtcgggtcaggacttcctgggctcagttgtgcctggtaggtggctcaggcagagcgtggggtgagcaaggggtgaagaggaggccgattgcaggggagggtcagcgtgaggggagtgctgctggcagtgggcctgtggaccggctcccaccgtcaggctgcaccaccccgtgggccatgaggggagccagccgggcttgtcagcgagtgcgtggcaggggctggcctgtgaggcagaagggtcacctcagcggcccggggggcaggacaaggctggtgccagaacccagcagaaagaagggccacagggatggagaggagggggctggcttccggggctccacagaggtggggagggcggcagctaatgggcctggctgtgcagtgggtgctgggctccccaccactgttctctggtgccgctgaggcctcccttccagagcctgcagccgatcaggcacctgtgtcttctctccccgcgcagggcatcatgctggtctacgacatcaccaacgagaagtccttcgacaacatccggaactggattcgcaacattgaggaggtgaggccctccggctcctcccactgtccctgcttcagtccttgtcccagagccctctggtttactcatgagaaggccaaggtgcagagacacatacaggccacttgcccacagcctcctagtcagggacatggtgggagcagggactgagatgcaagcagccggccccagggaccacacactggcctggccccaccccggagcccctcggagcccatccctccagctaggctgttggatctggccagtgtcatggttataagagaaaggatatccaagcttgtggtcaccatgagtgttgggtgctttctagagaaggaagggtctagcacaggtgtgacccttgtagttggagggtgtggtgagcaggcgtcagttgtactttgagctatatcggagcagggtgtgacctggtacaaacgacctgtgttcagaccttgaaccatagagcagtgagaagtaggccaacccctcctcccctcccaaagccagcatcttcatcttctgctccccaaagagctgacctcacccccaaagccttcctggctgccggcacctgcagctttctataactaaccatgtggggcttcaggtctgaggcacagccagagaacttttcccatctataaaaccacagcaaaagggcatatcactgtccacccaggactcatggacctcccaggccaggccgagaggccaccccatcatttgtgagtcattgcactgggctcacctccccagtgaccctgagagggctgtgctgccaaatttgccagtgcagggctgcaccccagctgggaaagctgtcttcatccgtggagaggaggagagcctggtctttgtgaaaggtctctgtttctggccagcgggcaggagccaccttctggttcatgggaagtgaggcagggagtggcgcagtaggttccagagaccaagtctgagctggtggaagaagacagcagtttccagtgtccccgtcctccaggaagcgtggtccgctccatggggacccagggagacttgacgaaggagctgcctttgggtatgagggcagagtttgggcaacatcagacagggtggtgaagtgcctgcagctggtgacggcctcgagttgcgaccacctcaggcacggcctgtttctggagcccaaaaatagttgaaatgtcagggccaggcgaggtggcttatgcctgtaatcccagcagtttgggaggctgaggcgggcagatcacctgaggtcagaagtttgagaccagcctagccaacatggcgaaactctgtctctactaaaaatacaaaaaattagcctggtatggtggcagatgcctgtaatctcagctattcgggaggttgaggatcgcttgaacctgaaggcagaggttgcagtgagccgagatcatgccactacactccagcctgggagacagaacgagactccatctcaaaaaaaaacaaaaaaaaaagtgtcaaagcagaaggtcccaggacaacagctggggcctcttgcagaggagccagggagggaaggaggaaagccaaggtcggggggtaaatatctcagcctcactcacctcccataggctagacccgcccagcatcccaggtgcgggggcttgattgatacagccatagaagctgccagaaagcatttcagaaaatgtgcatttgctcagagtagcagctagaaccctggccccagccctggcattggctgtgtgacatggggccggctgcttggcctctctgagcttcagcttgtcccttagaccaggctgtacctagcagtcctgaccccaccgctctgatttctggggacagactgtgtgttggcagaggcacctggcctgtgtcatccggtctgatcccccgtctgtccccctccctctcagcacgcctctgcagacgtcgaaaagatgatactcgggaacaagtgtgatgtgaatgacaagagacaagtttccaaggaacggggagaaaaggtgggcatggtggcacaaggggcagagggcctcggggtcttggggttcttgtgcagaggccttcccctgtccctcctctgccccaggggcctgagacgagttggtcaccccagtggggcacgtgccatgggatgacagaagcacacacccagccggggcttcttgggtgcactctgcgggcatctcatcaaaacctaccatggccccgctccagactttcaagaccacaggagcggggaacagagccatagtttgatcccagcaggtccccgccaccctcccatctcagctgccatccccagcaactccatgccctgtgaggccctgtggaggggcattcactatagaattgagggagtgatccaggaagtcacgcccacagccccagccctgttgctgctccctcttggcgccggccctgccttcagctcctgttttaggcaagctcagatgcgcccggcggctggtgtgctcatgcgtgtgcctccctctctcacagctggccctcgactatggaatcaagttcatggagaccagcgcgaaggccaacatcaatgtggaaaatgtgagtcccgggccctgctgggagacatggggcctgcaggatcggccccttcaggctaaagggggagctggcgtcctccgaggaggtcctgccagacggaccagcctcgggctcagggctgccagtcagtcctctgagggacatttcctgggcagtgccacgtgccaagcacaggcagcccctgggaatgtgccatcagcagggacaggcaccacaaagggcacctaggacgcatctcacgggctcttgggcagccctggggaataggcacggttttacaggtgaggaaactaaggctcagaaagacccagctctgtgtttaccctctcagccacaccactcaccctggagaggcccctgtcaaaaaagcccagacatagcagggagccctgatgggacctgggcccatgccaccctcccctctccacggggcgaccccagccctgcggccgatcctgtgatgtttccccatcctagtcatgtttccaaggcggatcttccatatcactcccgacctaaagtctctatgctgacgtgaagacaaaggctagactccttgcctggcgtggaaggccctccctcaccggctacagctggtgtttgccacccagggctcaggccttgccctccccaggccacctgggctgctcccttctccaatacgtcactgcatttccctcctgtgtgcccctttttctgcctgccaggttcccttttctagtcagggcctggccctgggggcctctccccaagaacaccttcagtctcccctgggccttcctccgcaccccaagccactctcctctccagaacctcccacatcatggggatgtatgttgggatcacgcctcccgccatctctgtatgtcccctcctcaaggctgtgacagcagctcaacccttggctgtgctgggagatgaacctgctcccgctcccagccctgccaggcaaggactccgagtgaagcttgtttggccacagagctgcttgcctttttccctgaccatcagaagggaggccagagctgacagaacctaggagtcagagacaaagaactgggcactcctagatccttctggattggtcggttaactgctgggttcctttggacaagtcacttggcctctctgagcctcagtttcctctctggccaactgagtgtcgccccatctcacagggcttaggggaggtggcacatgcgtaaagtcccgtcaatgctaaggtgctctgcggaagtgagagttgatgtcagagagtaagggtgggtgggaggcagagggagccggggaaggatgagctggggccggacaggccagatgaacccactgccagaggcgggcatcaaagggccaaatgggaggcccacgcctgggaagctgtctcaccacacccgctgtacacgggcggctgaggactcagggtcctgccatcccaaggactcacaatgtgcttattccacaggcatttttcactctcgccagagatatcaaagcaaaaatggacaaaaaattggtgagtgtgtgtccttccgagatccccgggtggatctctgggatccagccatcgtcgttagcagcagtgatatgacgtgccctagatcctgctttttagggcccagccagaccccatgggacattgctgggaaagggggaagagtttgcaggtgtggctggggcatcagcatcaggcagtgccagcctggggacgctgcccaagcagacaaggccgtgcccggtgaatccccaggctagcagggagcacacggccttttccattccactcaagggccagaaagacaacatggtgtgcaaggacagagagccatggctcggagaaaagcttcctaggtcgcttgggcagggccagggctggtgtctgataactgctggctcatcgtcttgacaagcatggcagatcaagaacctgcccccgctccaccccagccccagatgctacaagttgtgacagctctgcaaccttcattgtgtcccagggttctctgaggcctccagggaagtctgcatgaatccctacccatctaccctctcattcgtttcttgcttttttttttttaccacgttagcgatttcctagtccgctgcgctcagtatcaatggtgctttcttgatggaatcaaacacttccctgtactttgggggcatttagtgcctaaacaccgtagtgacccttcctccctcgccctggttccagcaactgccctttcccggccatgttacattggttgtccaatcgaggagcacacggcgctctatttgtgggttaagtctggtcacttgagaatgcacataaaatacaaaatgccgttcaagttttacatctgatgtaagcaaatctgttttgtaattctaagatgcggtgtgttgaacagtgaggcatgtgattgatttaatagcagctctttggccattaaattaaaatgggaaacagttcatggaaaccagtgcactgaccaacaataatttgggattttcttgcaattttttttcttcagtataatggtcaaggtctgattcttttttcttttagttttcttattagttaaaaaagagattttttttttagagtctcactttgccacctaggctggagtgcagtggcaccatcacagctcactgcagccttcaactcctgggctcaagcaatcctcccacctccgcctcccaagtagctggggctataagcacacaccaccatgcctggctaattttttttctttttctttttttttgagaaggagtctcgctctgttgcccaggctagagtgcaatggtgcaatccctgctcactgcaacctctgcctcccaggttcaagcggttcttctgactcaacctcccgagtacttgggattacaggcacatgtcaccacgcccagctaatttttgtatttttagtagagacgaggcttcaccatgttggtcaggctggtcttgaactcctgacctcaggtgatccacctgcctcggcctcccaaagtgttgggattacaggtgtgggccaccccgcctggccattttttcttttttaagaggcaggatctcacttgttacccaggctggactcaaactcctgggctcaagcagttcttctgcctcagcctcccaaagtgctgggaagggtatgatggggtgggcagataagtgagagagtggttggaaggggtggtatatagcagatggaaaatagatctgtttctgaaaaacgaattatcagttgtaagagaattggatggatgggtagaagataatggatggatggttggttgaaagggaataaatcgatggttgatttgttggaaggagatggttggatagatagatgattggtttgttggttggttggaaggggatggatgaatggttggttggaaggaggtggttgcttggaaggggatggatggatggttgattggtcagaaggggtggttagaaggagatggttagttggaagagggtggatggggggaaggagatggatgggtggatggatggttggaaagggatggatggatggttggttggatgaggtggttagaaggggatggatggttggttggttggttggaaggggatggatggttggaagaagatggatggttggaaagggatggatgagtggatggttcttggttggaagggatggatggttggttgattggtttgttggttggaagcaggtggatagacggatggaagggaatgggtgagtggatggatggatggttgaaagggtatagatggatggttggttggttggttggttggttggttggttggttggttggttggatggttggaaggggacagctggacggactggcagatgatggatggatggtttgatggctgattggttggttggatggctggaatggtaatggatggatgacctggcagatgatggatggatggttggatggctcgttggttagttggttggtttggctggtttgattggtttggttgtttggttggttggttggttggttggttggatggttggatggatggttaggtggatggttaggtggatggctggttgattgtgagacgtagtgctgattctcagtgataacctcagaaaacctcttgtgatttcaggaaggcaacagcccccaggggagcaaccagggagtcaaaatcacaccggaccagcagaagaggagcagctttttccgatgtgttcttctgtgaggaacaccgccttactctgagcctcgctcagcccagctgactgtgcctgttctgagtgagcccctcactcagccggggccctcccacctccaacgccccgcccacgccgcggccaccgggcccacggccaccagaatgcaattgagaaatcgtttattttagtaactgtctgatctttttcaactttggagatggaataagttaaaaatttgctatttttcctgtaacatctgctgaacgggcccacccacacgttgtatattcagagagagagagggagtcaaggtgtgaccgtcgaccacagccagtgtcaggcctctgcctctgggcctttgctttgtggcctcactgcaacacaaagctccaccaggaggctggttcacgtcccctaccacggaagcgaggtcccagaaggccagcggtggttccaggagcaacagctcccaaaccctgagcaaggcaaccgatcgccaggaccaggaagcatcacccaggagatttggcgcccacttccacctcttctctcagttttggacaagtgacaaaccattttgccccctcactcttcttttttaactgttaaaccaaaggaaagcacaaatgaaggaaatcctgtgtaaagcattgagaaggaaagaagcctggagcagcctctcctgtccacagccaggggttaggtctgcaggcccgtctgcggtccccatcgagcatcaaggggacgctgtgtgtgctgcaagtgaccccgaaaacaaccacagccgtcacatggtcctcctgaagttggggcaccctcctctcagcaccaaaatggcccccactccttcgtgtcctcccgctatctccaaatcggacgttctttctagctgagatttttatttttccacatctgtagtgccatgaagcgattctgtctttgacttccaatggcaaacctgggtgatcgggaacaagcacgttgtacccttggctggacatggccaagacacaaggcattccacggcggcaagctgaccgcacagcagtctggcttgattttcagccgtcatcattgggttctgttttgacagctctgctgtcccatagggactgcgactgggaccaggtcaaccacgccaggggggtgtcaccagccttttctttttttctttctttttttttttttcctccttaagctgctgtcaatccaaaccattggcatcatcgtttcttttgaattaaaaccaacatatcagcaatagtctgctctccccgggaatctctaacatgctctgtttacatcgataaatgcacttaaggaaaacaaacaaattaaagctcatcttaaagtccaaggatttttatgtccacattttccctgtaggccacacggacatggccaggtgctgggggtgggtctggacaagatggtagagcccatggattaccccatcgagcggccacctcagaggagatgccacccatcatcaaaagactaaattgggaaaagaagcctcctggcttggtgcagtggctcacacctgtaatcccagcactctgggaggccaaggcgggctgatcacttgagctcaggtgttcgagaccagcctggccaacatggtgagcctgcgtcacctggcttctggcacacagctcggccactgtgtccctcctgcctccctggcaggtccttctaggggccctctcctggctggctttccagggcattccttccactctatccagggtccttcccaagaccacacccaggtccagtcattccctaggacttggcagagagctgtactcacagccaagatcacagcaaaatcagcaaagggaaaaggcatgcagagtgaagtccagaggcaaccagacagaagcatccagaatcctctcacagtggggtcacacaccccatgcttaactcccccaacaatgagttgtaacaacaggtgtgtaatgtgtcttttgtgaaagctagttggcagttctgtacccaggtgtttatggagccagtcacataggaaccctctacctggcacttatcaggattccagactcctacaaagaaagcaggggtttagcataaaccgcatcacttgtacagaaagtgtatgagccacgcatgtagggaagttttaatatccgtagggaactttaccaactgcaggcccaccttgccagcaggcctttctcaggaagcagcctcagatctattcattcttttctgcacacactatgcttttagataggccagtggctttcaagctgcaaatccaggccagacccaggtcggtttcacctgccactctctattccaatttgaatgtctcatcggcaccgtaagcataacacagccctgaccctggactccatccctgccttccccatcgtgcccacagctgacccctcccgagttgtagccacgaccacctggacctctgtgaccacttcctcatgggtttcaggtcctcacctctgtgtttcaaactattttcagagtgtccttacgaaactgaaatcagtgtcacctccttgcttaaagctctccccaggggctggggtgtgtggcttatgcctataatcccagtgccttgagaggcagaggcaggggaatagcttgaggccagttcaagttaaagaccatcctggacaacatagtgagaccccatctctaaaaaaaaaaaaaaaaaagtacaaaaattggccgggtgcagtggcgcatgcctcatcccagcactttgggaggccgaggtgggtggttcacctgaggtcaggagttcagagttcaagaccagcctggccaatatggcaaaaccccatctttactaaaaatacaaaaattaggcatggttgcacgcgcctgtagtcccaactactcaggaggctgaggcaggagaatcgcttgaacctgggaggcagaggttgcagtaagccgagattgcgccactgcactctagcctgggtgacagagcaagactccgtctcaaaaaaataaaaaatagtatggtggcatgcacctgtagtcccagctactcaggaggctgaggagggaggatcacttgagcccaggagttggaggctgcagtgagctgtgaccacaccactacattccagcctgggtgacagagcaagaccctttctcaaaaaaaaaacaaaaaacctccccaggtcttccttgggcttagggatacaacttacgcccctcaccgtggggcacaagcctctacacgctgcagccatagccctgcctactccttcctctttctctggctgcccttcctggctcactccactccaatcctctccttccttactccttcactccacactcatcactgagaaggccccagggcctttgcacttgccacaccctagtcttgtagtctcctgaaatgtgcaaagcccactgtccatcacatcatggttatccagggctacctctgcagaggcctctcccagtcatgcccttctctcttcctagctcatcttcatagcatttatgagaagttacctgttttcattgccaaccctgtccccactcagcccaaaacctccatgaggacagggacttctgtagtgtgcttgtgtgtggcctgaacccattgaattaatgaaggacacgcaaatggcctctagggtgagcacaagggaggagacatcctcttccctcaaagaaaccagcttccagggttgatcctgcagcctctgcagcctagggggcagctccccaggcattgcaaactcagtgggtttgggaacccccagccacaaactcccttcccacctgaccatgctagaggcctgccctggtggtccctggcttagctcccatcaaaatctctgtcatctctatccttgagcctccgagcacgcactcaggaggaccctgaatcctgatactaaaactcaaaagtcaccccctgccacggatgcctgataaatggccactttgggaaacttgctttctttccacgaaactttgcagtttctgtccaaaactgcaaaattcggagacagtgacagccaatggcaatgaatagcagatcctgactgggaacccatcctgtgcctggctttcttctgagcccttaatgggtcacggataagagggagctgcctgggcccgaatcccagcaccactcaagacccacggtgatagaggagctagaaagaaattatttaggcagatagtgagggcaccagagtccttggcggaatttcttttctaacaaaaagcagcccaagaaattattttttctaacaaaaagcagtctgagaaatcgagctgcagacatagataagcgagctagaagcttgcacggggaaatgccagcagctgcgtcaatagaaaacagttgcctgggtgccaggcaagaccaacgtggagactccatcttccctgtttttattaccacgtgtacagtaaagggatgggcaacatggcacagctcaggcagaggacccgcttgcatgataaaagattaggggtggccagaaattcacacccgatgcaaatggcacacctagtcctaaccagtttttcacaccctatgcaaatataacacctagtccaaccaatctttcacgccttatgtaaatcaaacactgcctcctcaccaggcatctataaaatcccctgcatttcactgtgcatctgtcaatgcattttttcaggacctctctctgcaggagggaactcttctctttcttttgcctattaagcttctcttaacctcactcttgtgtgtccacgtccttgttctccatggccatgagatgacaaatctcgggtatctaccccagatgaggccgtttcaatggcacagccttggacacatgccctcaacaactgaacttagtttcctctcttgcaaaataggggggatcatagtttccacctcataggatggctatgaagagccagggagatgatggatcccagaggaggcacaggtacatacataatgagcacagagacagaataggctgatatcagcatcatcactgtcctcatcactgtcatcatcatcattatcattattttaaagcagggtcatccggccgggcgcggtagctcacacctataatcccagcactttgggaggccgacgtgggtggatcacttgaggtcaggagttcgagaccagcctggccaatatggtgaaaccccgtctctactaaaaatacaaaaattagccagaaatcacttgaaccagggaggcggaggttgcaatgaacctagatcatgccactgcactccagcctgggcaacagagcgagactccgtctcaaaaaaaaaaaaaaagaaaaaaagaagcagggtcttgctctgttgcccaggctggagtgcagtggtgggatcatggctcactgcagcctcaacctcccaggctcaagtgatcctcctgccttagcctcccaagtagctggtactacaggtgcataccaccacacccaactaattgttttacttttttgtagagatggtgtctcactgcccaggctggtcttgaactggcctcaagtgatcctcccacctcagcctcccaaagtgttgggattacaggtgtgagccaccacacccaccctgttattactatgaccaccattgttcatcttgttccccaagaaaagtgcagtggtgcaatcttggctcactgcaacttctgcctcctgggttcaagcaattctcatgcctcagcctcccgagtagctgggattacaggtcccgccaccacgcctggctaatttttgtatttttagtagagatggagtttcaccatgttggccaggctagtctcaaactcttgacctcaggtgatccacccaccttggcctcccaaagtgctagaattacaggtgtgagccaccgtgtccagccagttctggacatttcatatcaatggaatcatgcactaggtggcctttgtgtctggcttctctcagcatcatgtttttggggctcatccacattgtagcatggagcagtgcttccttcctttctgtggctgaatcatatttcatggtgtggatgatggaaccacgttttgtttacccattcattcattcatggacatttgggttgtttccaccgtttggacaccttagctgtcatcatctgtgcctcagacataccaagttctttcctaccacagggcctttgcccgtgctgattttgtttgtttgtttgagatggagtctcgctctgttgcccaggctggagtgcagtggcaagatctcagctcactgcaccctccgcctcccgggttcaagcgattcttctgcctcagcctcccgagtagctgggactacaggcgtgcgccaccatgcccagctaatttttgtatttttggtagagacagggtttcaccatgttggccaggctggtctcgatcccttgacttcatgatctgcctgcctcagtctcccaaagtgctgggattacaggtttgagccaccgcacccagcctgcccttgctattttcttttctgcctgactgtcctgcatgtgaactcattcagcatctgtctcctcatagactgtgggccctagaagggtggggaccatgccaatcttgccttttttttttgagacacagtctcactctgtgacccaggctggagtgcagtggcatgatctcagctcactgcaacctccatctcccagttcaagcaattcttctgcctcagcctcctgagtatctgggattacaggcatgagccactacgcccaactaatttttgtgtttttagtatagacagggtttccccatgttggccaggctggtcttgaactcctgacctcaggtgatctgcccacctcggcctcccgaagagctgggattacaggcataagccacagcacccggcccgatcttgccttctgcttcatctgcagcatctagcatggtgcccatccagagctggggctcagccagtgtttgtgaaatcaatgaatgaatagaatgaaggcattgtaggaagctaaaatcataaaattacatcaagtccagggttgggcacagtggctcatgcctataatcccaacactgggaggctggggtgtgaggattgcttgagctcaggcgttctagaccatcctgggcaacacagcaagaccctgtctacaaaataaaaattgaaaaattaaccgggcatggtggtgtgagcttgtgattgcagctacttgggaggctgaggcgggaggatcacttgagcccgggagtttgaggttgcagggagctatgatggcacagtgcacttcagcctgggcaacagagtgagaccttgtctctaaaaagaatcgcatcaaacccagtgttggcagagcctaagggcttccccactccctgacatgtatgggcccagcattttcccagcactaagatggcattgtggccacctcccccaagagccaccccacgtgaatctgtgaatggcccacttaccagctgcggcctctgctgagaagcccagatctgtctccctggagaacctggtatcagagagagggggccttggaattctagccccgttatctccccatcagggcaccttcgttttcccctccacacccttccttcctctgggggacgcatgtccgtttgcgggccgaggcctgcggacactgaggggtgtgggggtgattctgttgcgacatctgaaaggaagacgttagtttgtgggagaccacatcacccaagcaggtcaggggaagcgaggttgggccgtttgtggtgaggtcttaggggactgtgctagagctgggccagcgtacccccatgttcctggaaactctaaaccccatgcaaataagagccccgatggtcagactttcccaggaggatcagagaagtgaagtgaagtgaaggccaggcccggtggctcatgcctgtaatgccagcactttgggaagtccaggcaggtagatcgcttgaggccaggagtttgaggctgcagtgagttgtacttgcaccactgcactccagcctgggcaacagaacaagatcctgtctcaaaaaaataaaaaataaaaataaataaataaatacttcaggcctataatcccagcactttgggaggccaaggtgggcagaccacttgaggtcaggagttcaagaccaacctggccaacatggtgaaaccctgtctctactaaaaatataaaaattagccaggagtggtggtgcacacttataatctcagctactggggagactgaggcaggagaatcgcttgaacccgggaggtggaggttgcagtgagccaagatcgcaccactgtactccagccggggcgatagaacaagacatcatctcaaaaataaaaaggccagatgcagcagctgacacctgtaatcctaacactttgggaggctgaggcgggaggatcacttgaacgagaccaacctggcaacatgacaaaaccccatctcttcaaaaatccaaaaattagccaggcgtggtggtggtgctcctgtagtcccagctactcaggaggctgagatgggaggatcacttgagcccaggaagtagaggctgtggtgagctgagactgcaccactgcactccagcctgggcaacagagtgaggggaccctactcaaaaaaaaaagaagaagaaaaagagattagccacagagaggtgaagtgagttgcccaaggcagctcagcccatgaggtctgaggcccaagccagagtctcccccaggcaaacacaaaggccttgcttgaattaagtcacaacaaagagtcctgattctctcactcccaactcatctccatgtgctgtgctggagagttgcctctcctagcatcttcacatgattaaggagggctattatgcccattgcacagatgcagaactgaggctcagagaggctgagcaactcaccttaggacacacagcaggtgagtgagaagcagggctccacgtgtctcctgcttagaccttgttgaccacagagggcagacgaggtgctgctgttgccgaggaggagcaggggggtgagagaggcacccagggtgagcctggggttatctagcccagctgggccagggcaataggcccttggggaggcccccagtaggatctgggccctttctgcctgaaaggagaggaggaagtagttttgtttgtctgcctggggtacgagcacacggccagagctggccaatctgttaggcacacagggcctgcacccaggacccaagtgctgtgtgggacttcccaaagggcttcagcttatttaaaatcagaagaaaaaaaactgaacatcctaataataaatatacaataaggaatccagcctggaccacatcggtcttaatgccaacacagttgtaaaatagaattttaagctggcacggcggcccacacctgtaatcccagcactttgggaggctgaggcgggtggatcacctgaggtcaggagtttgagaccagcctggccaacatagtgaaaccttgtctctactaaaaatacaaacattagccaggcgtgttggtgggcacctctaatcccagctactcaggaggctgaggcaggagagtcacttgaaccaaggtgggcggatcgcttgagccccaggagtttgagaccagcctgggcaacacagcaagatcccatctccaaaaaaaatatttttttaattagtcaggtgtggtggtgtgtgcctgtagtcccagctacttgggagcctgaggcaggaggatcacttgagtccagcagttcaagactgcagtgagctatgatcataccactgcactccagcctgagtgacagagtgaaactctgtctctaaaataggttagtcaattaataaaaatattttaaaatattttataatggaggaagtcctggtgtggacctatgcgtgccatgagaccccagcctgtccaggctcaattcagtttcaaggcctttgtgcctgctcttccctcccccagcctgggcaatatagcaagaccccatctctacaaaaaaatatactctttctgcactacgcactccccaaatcaagatgattccttctcaccctcaaatgccccttccttcacgtcagttaggtcacctctgtgggtttgtgcaactgctgttcccacttcctgtttcccctttggatttttttgtttgtttggggttttttgtttttttgttttgttttgtttggttttcgttggttttgttttgtttgagacggagttacactctcgctgcccaggctggagtgcagtggtgagatctcagcaaaccgcaacctccacctcccgggttcaagcgattctcctgcctcagcctcccaaatagctgggattacaggcatgtgtcaccacgccgggctaattttgcagttttagtagagacgggatttctccatgttggtcaggctggtcgcgaactcctgacctcaaatgatctgcccaccttggcctcccaaagtgctgggattacaggcatgagccaccgcacccagctggtgtttttttgtttgtttgttttgcgggggacagaatttccctctgtcatccaggctaaagtgcagtggcgtgatctcggctcactgcagcctctgcgtccctggtccaagcgattctcttgcatcagcctcctgagtagctgggattacaggcacccgccaccacgcctaatttttgtatttttagtagagacagggttttaccatgttggccagcctggtctcaaactcctggcctcaaatgatccacccgcctcggcctcccaaagtgctgggattacaggcgtgagccaccgcgcccagtttctgttccccctttgttgcttttgtttttgttttgagaaggagtctcactccgttgcccaggctggagtgcaatggtgcgatctctgctcactgcaacctccgcctcccgggttcaagcaattcttgtgcctcagcctcctgagtagctgggattacaggcgtgcgccgccacacccggctgattttcgtattttaatagagacggggttttgccatgtttgccaggctggtctcaaactcctgacctcaagtgatccgcctgcctcagcctgtcaaagtgctgggattgcaggtgtgagccaccgcacccgttccccgttctccctttgtaatgatgtctcactcctcttcactgcttgatagattatagatgccaggagtcagggggcctgcacctgtctccgtgtcacccctgtgtcctccaaacagcaggcacacagtaggtgctcaataacaacttgctgggggcaagacaggagcaagctgtctctgcacctgtggcaccagatgctttgttggactgcagacagggtgacttgagctgtccttgttccgcccccagggctcacctgcttgaggaaacaggaactgcctcggggcagccagccccgccccattgacgtgcagaccttgaatcgaaacccaggctcctgcaggcactggcacagctacagcgagggcctcggccatccaagggtctcccaggtatgtgacccaagagcctcagccctcgaggagacagaacgtgggggctgggctaggccagaaggagggacagggctagtggggcctggggtggcaggagggattttctaggggcatgggggagagcttcgtggaggagggggtatttgtggtgaccacaaatggaaaatggagctggagttagggaaaagggggtcttggcaagacaacagcatgagcaaaggtatggagaggcaagagagagagagcaaggatgtctttaggtctagaatgtgggtagcggggaagtagaggaggctcccaggccagggtcaggagcttgaatttgagcatgcggtctttcatcactagatagctgttcaccagcaaagacccttgcaccctcctctgtgccaggccagcaccaggacacagaaaaaaacaacaacacaggaacctagccctaagccctgatccctaggaggccctcaggctggtggagacagagcaagataaagacactctagctccatggagtcatggctggaccagagagaggaacaggggggaacgttggggacagagaggggtgccagggtgttgtctggggggagatgcaggaaagctgcctggaggaggggacatttttactgggttttgaaggataaataggagctcttccaagtaaaaaaaaagaataagcctgtaaacattaccccatgataggtcacaactggattcatgaatattgtatatatatctctatatatacacagtgctagctaaactttcctaggtaaatatcattattcccaaattaaagacagaaatacagggacagagagccattaagtgacttatctgaggtcacacagcggctaagtgggcgagctagggtttgaacccaggccatctgggtcgaattctaggctcttttttttttttttttttttttttgagacggagtcttgctctgtcgcccaggctggagtgcagtggctcgatctcagctcactgcaagctctgcctcccgagttcacgccattctcctgcctcagcctcccaagtagctgagactacaggcgcccgccaccacacccagctaatttttcgtatttttagtagagacggggtttcaccatgttagccaggatggtctcaatctcctgacctcgtgatctgcctgcctcagcctcccaaagtgctgagattacaggcatgagccaccgcacctgtcccaggctctttttttgttgttggtggtgatgggttttttttttggggtttttttttttttttttgtgagacagagtttcgctctgttgctcaggctggagtgcagtggtgcgatcttggctcactgcaaactctgcctcccgagttcagatgattctcctgcctcagcctcctgagtagctgagactacaggcacatgccactgtaagttttgtatttttatttcatatttatttattttgagatggagtcttgctctgttgcccaggctggagtgcagtggctcgatctcagctcactgcaacctccgcctcccagattcacgcaattctcctgcctcagcctcctgagtagctgggattacaggggtgagccaccttgcccagataatgattgtctttttattagagatggggtttcaccatgttggccaggctggtctcaaactcccagcctcaggcaatccgcctgcctcaggctctgacagtgctgggattacaggtgtgagctactgcacccagcctccaattccaggctcttaatcattttgtcaccctgctttattaaacatttcttaatacagttatttaattttggttgccccagaattccctcaggccataccccagagggtatgcttgacatctggttggagaaagtcaatattgactgccattggtcaacagaccccgcctcctcatagagacagcccagtaaaaagatcttttgagatattgaaacattagatggggccaatgggtggagggagtgagctccagtttaaggacagaatttatggtgagtggccgggcgcagtggctcacgcctgtaatcccagcactttgggaggccaaggtgggtggatcacttgaggtcaggatttggagaccagcctggccaacatggtgaaaccccatccctgctaaaaatacaaaaatgatccaggcgtggtggcacatgcctgtaatcccagctattcaagaggctaaggcaggagaatcacttgaacctgggaggcggaagttgcagtgagctgagatcgcgccactgcactccagcctgggcaacagagcgagattccatctcaaaaaaaaaaaaaaaaaagaattaagggtgagcaagaggggtcctgaaggaactatctagcaagatacaatcctttggcttgtcttacactcacttaataatgttttgcaaaacggtgctgctttctctctccagctctgtcattggtacacaaagtcccatggtaccgcttgcttaaaattgtcaagaaagtgtgtgaattaatgatgcatctgacatatcgtaggtgtgccatgagtggctacaacgtgtagtgacgttggtggcagaagtgactgtctgaagccacatttctctggtgtttaatgaaaccaaggcagccaggcactgtggctcatgcctgtgatcccagtatgttgggaggctgaggtgttaggattgcttgagcccaggagttcaaagccagactggacaacagagcaagaccctgtttctacaaaaaaattttcaaaattagccaggcatggtactgcatgcctgtagtcccaactactcaggaggttgaagtgggaggattgcttgagcctaggaggttgaggctgcagtgagcatgagctgtgattgcaccattgcacactccagcctcaggaacagagggaaaccctgtctcaaaaaaaaagaaagaaagaaatcagggcaaccctttttgaccaccaccgttgggtcagctgtttatttcgttcacttgccattttgtcatttccttattcctccaggggccttgatatttacttaatatttaaatactctactcttttttttttttttgagatggagtctcactctgccccccaggctggagtgcaatggcgcgatcttggctcactgcaacctctgcctcctgagttctagcaattctcctgcctcagcctcctgagtagctgggattacaggcacccaccacctcatctggctaatttttgtatttttagtagagatggggtttcaccatgttggccaggctggcctcgaactcctgacctcaggtgatccacctgcctcagcctcccaaagtgctgggattacaggcgtgaaccaccatgcccagctctaaatactctattcttaaatttcaaaacatttatttataaaatgaactttctagtccttgcaataatggcataaaaggctgggcacaatggctcacacctgtaatgctagcactttgggaggctgacacaggtggatttcttgagtccaggagtttgagaccaatgtgggcagcaaggtgaaaccccatctctacaaaaatacaaaaattagccaggcgtggtggcacatgcctgtggtcccagctacttgggggactgaggtgggagaatcacttgagggaagaaggtcgaggctgcagtgagccaagatggggccactgcactccagcctgggtgacagagtgagaccctgtctcaaaaaaaaaaaaaaagaaaaaaaacacaatggcataagaagaataaaaggaaaagtccttgaaggcctttggggatgagccaatgaatgaatgtgtaaaaactatcaggcacatagtaggtgcccaaaaaatcacaagccagtggttttttttttgttttgttttgttttgttttgttttgagacggagtctcactctgttgcccaggctggagtgcagtggtgcaatctcggctcactgcagcctccgcctcctggggtcaagtgattctcgtgcctcagcctcccaagtagctgtgattataggcacaggccgctgtgcccagctcatttttgtatttttgtagtgacagggtttcaccacgtggcccaggctggtcttgaactcctgatctcaggtaatccacctgccttggcctcccaaagtgctaggattacaggcgtgagccaccacgcccagccacacaagccagttttttgttgttgttgtttttgaaacatggtcttgctctgttccccaggctggagtgcagtggcacaaccacagctcactgcagccatatcctcctgagctcaagggatcctcccacctcagcctcctgagtagctgggactacaggcatgcaccaccacacccagctaatttttaaattttattttattgatttatttgcttatttattttttgaggagtctcactctgtcgcccaggctggagcacagtggcatgatcttggctcactgcaacctctgccccccgggttcaagtgattctcctgcctcagcctccggagtagctgggattacaagtgcccaccaccacacccagctaatttttgtatttttagtagagacagggtttcatgatgttggccgggctggtctcaaactcctgacctcaggtgatctacccaccttggcttcccaaagtgctgagattacaggcgtgagccaccgcacctggccaaattttttaattttttgtagagatgggggtctcactatgttgcccaggctggtctggaactcctgggctcaagcaatcctcccaccttggcctcccaaagtgctgggattacacatgtgagccgtcacacccagccacaagccagttttaagtccattgctctgtccaccctggaggacttctcaaaggaggaggcaccacaagcttcaagaatagagcaaagataagaggtgcatcaagcttgattcttgtcttccctcccttctctacccaggtgaccttccctccaccccaggaagctatgacagaggccgggaagctgcccctaccgctacccccacggctggactggtttgtgcacacccagatgggccagctggcccaagacggggtccccgagtggttccatggtgcaatctcaagagagtgaggacacacccacaccctccaccctgccctccccaccctgtccttgtctgtccctaccctgggcagcttttaactgcagaattctggacttggctcagctcagtgtggcaagaggctaaaatgagctccaggctcccaggcttgaatcctgccacctctttgggctcactgtgtgacctggggcaagttacttgctctctctgagcctcagctttctctatacaagtggccaacagaccagcactgccagggacctggcagcaccccacacctcgcccaggccaagcattaccaatcaacgatggcagcatgcagcctcagaatctttctctctttctttttgagacagggtctcactctgtcacccaggctggagtgcagtggtgcaatcttggctcactgcaacctctgcctcccggactcaagtgattcttccgcctcaacttgctaagtagctgggattacaggcacatgccaccaagcctgactaatttttgtgtttatagtagagatagggtttcaccatgttggccaggctggtctcaaactcctggcctcaagtgattcacccgcctcggcctcccgaagtgctgggattacaggcgtgagccaccgcacccggccagaatctttctgaacacagtactccaagcagctgctctcaacccatcaggatacaaccaatgtgccctttctttttttttctttttctattttttttttttgagacagagttccgctcctgttgcccaggctggtgtgtagtggcgcgatctcggctcactgcagcctctatctcctgggttcaagcaatcctcctgcctcatgagtagctgggactacaggcatgcaccaccgcacccggctaatatttgtatttttagtagagacgaggtttcaccatgttggccaggctagtctcaaactcctgacctcaagtgatctgccggcctcggcctcccaaagtgctgggattacaggcatgagccaccgtgcctggccccaatgtgccctttctacctcagactgtgagctctgaggatgtgggcccggctctaactaaatggaggaaaaaatatttatggccactctctgcatgcaggaaattgagaaaattctgtgaaggccacagagaggaagtagtattggtcatggtttctgagctctggggccttgctgaataacagaaatataacatgagttgcacattgcaatttaaaaaaattttagtagttatattaaaagaagcagctggctgcactggcacttacctttaatcccagctacttggaatgctgaggcgggaggatcgcttgagcccaggagttcaaggctggcctggacaacatagtgagactccatctctaaaaggaattttaggctgggtgcagtggctcatgcttgtaatcccagcactttgggaggccgaggctggcagaccacctgaggtcaggagtttgagaccagcctggacaacatggtgaaaccttgtgtctactgaaaatacaaaattagccaggcgtggtggcgcatgcctgtaatcccagctactcgagaggctgaggcagcagaatcacttgaacccaggaggcggagattgcagtgagctgaggtcgtgccactgcactccaggctgagcaacaagagtaaaactccgtctcaaaaaaaaaaaaattaactgggcacggtggcacgtgcctgtaatcccagctactcgggtggctgaggcaggagacttgctggaaccctgcaggcagagatcatgccactgcactccagcctgggtgacagagcaagattccagctcaaaaaaaaaaaaaaattaaaaaaattagccaggcgtgtggaacatgcctgtggttctggctactcaggaggctgaggtgggaggatctcttgagcccaggaattcaaggtttcagtgagttatgattgcatctctgcactccagcctgagtgatagagtaagaccctgtctcaaaaacaaaaaacaattcatgaaacagcatatgttccttttttgtgttgttttggaaatcagtacaaaaggccagtggcctctgtattgaacagtgcaggaccaaagtctccccagcttgtcccacagaaggcggccttcctctctgtgaactccagataataatggtaataatatagaaaatagactgatttcggtggctcacgcctgtaatcccagcactttgggaggccgaggcgggcggatcaccagaggtcaggagctcgagaccagcctggcaaacatggtgaaaccccgtctctactaaaaatacaaaaaattagctgggcgtggttgcgggtacctgtaatcccagttacttgggaggctgaggcaggagaatagcttgaacctgggaggcagaggttgcagtgagccaagattgcatcattgcactccagcctgggcaacaaaagcaaaactccaactcaaaaaaaaaaaaaaaaagagagagagagagaataatagtaataataacagcaaacattttgggagcacttaccaggtagcagctgtcatgcttatgttgcaagttctttctgttctcacagcagccttggaagtggagtttactctccccttgaggaagctgaaggtcagaaagggagagacgattgcctgaggtcacacagctgatggacagtagagctgggttatgaactcgaatgcatctgagcatacaggtccttctttgttacttgtgacaccttgatccacccaaaggtgccttaatcgggggattccaggcattgggaaggggctgtgggagatgggaggaggtctggcctgagatcaaggtcatcagacgcctcctagctcctcggggggaacatccctaatccctgaatagcccaaggtctgccacagctgaaaaaaaaaaaaaaaaaaaaaaaagatgggtttggggtgtttgttcatttagaaaacaggccgggcacagtggctcacacctgtaatcccagcactttgggaggctgaggcaggcggatcacttgaggacaggggtttgagaccagcctggccaacatggtgaaaccctgtctctactaaaaaaaaaaaaaaaaagttgggcatggtggcgggcgcctgtaatccccgctactcaggaggctgaggcaagagaatcacctgaacccaggaggttgaggctgcagtaagccaaggtcacgccattgcactcagcctgggagacagagcgagactctgtctcaacaaaaaaaaaaaaaaaaaggaaaaaagaggccgggcacggtggctcacacctataatcccagcactttgggaggccgaggtgggcggatcacgaggtcaggagatcgagaccatcctggctaacacagtgaaaccccatctctactaaaatatacaaaaaattagccgggcgtggtggctggcgcctgtggtcccagctacttgggaggctgaggcaggagaatggcgtgaatccgggaggcggagcttgcagtaagttgagatcgcgccactgcactccagccggggggacagagcgagactctgtctcaaaaaaaaaaaaaaggaaaaaagaaaaatgaaaactaccagccttctccatgaatgatcccatggccccaggagtctaactggtacgtggggcggctggactgtttcatttcctttctgtgtgtgcccttccagggatgctgagaacttgctggagtcacagccactgggatcctttctcatcagggtcagtcacagccatgtgggctacacactctcctacaagtaaggcctgggccgggatccagggcaggggcaggtgggctcttgggtttccttggagggggcaaggggtgcttcatgtcatagcttctcagaaagcagcagtaactgaggctgtggatctgagaacgggagctgctagccaagcaatgagtgaagcttttgtccgtagtggcatgttttatctgaggccagcctttgtactcctgtgttataaatgggggaaactgaggcacagcgaggttagtaacctgctgggtgttgcatggccagtgagtgaagaagcctgcatgggaacctggggtagtctggctgtagcagtgacgctgccggcccaagggctggggacttggggcagggatgagggggagtaggatgtcccagcccccgcagtgtctccgcagagcccaaagcagctgctgccatttcatggtgaagctcttggatgatgggactttcatgatccccggggagaaggtggcccacacctcgctggacgccctggtcaccttccaccagcagaagccaattgagccgcgcagggagctgctgacacagccctgcaggcaggtgagggcggggacccacaaggttcacagccatttccttggggccaagccccccagacccctttgtttcccacgcccccatcagctcctcttgattctgtcactctcatggtccttggcccctccggccccaccccagtagtccctctgccccccacagcggtctccgttgtggttcctgcttccccatggctccgccctccaggcccatgtcaacaggctgattttttataagggttcatgtgccaggtataatcttggctcatctgaaggaatgacatctttccttagaaggctcggtgggcgtggcctggctcccaatacgctttccttagaaggctcagtgggtgtggcctggctcccaataaactgctgtgggtggagcatctttccttagaaggctcagtgggtgtggcctggctcccaataaactgctgtgggtggagcatctttccttagaagctcggtgggcgtggcctggctcccaatacgctttccttagaaggctcagtgggtggcctggctcccaataaactgctgtgggcagggcatgtttccttagaaggcccagtgggcgtggcctagcccctaagaaactgctgaggggggttatctctccttagaaggctcagtgggtgtggcctagctcccaataaactgctgtgggcggggcatctttccttagaaggctcagtgggtgttgcctagtccccaagaaactgctgtgggcagggcatctttccttatagggcttggtgtgcctggcctagctcccaagaaattgtggtaggtggggcatctttccttagaaggctcagtgggtgtggcctagctcccaagaaactgctgtgggtggggcatctttccttataggactcagtgggcctgacctagcgcccaagaaactgttgtgggcggggcatctttccttagaaggctcagtgggtgtggcctagctcccaagaacgtgctatgggcggggcatctttctttagaaggctcagtgggtgtgtcccaatccctaagaaatggctgtgggtggggcatattttcttataacgcttagtgggcgtggcctaggtactaagaaactgctattcaagggatggtccctgagacctgccttccagggtccgtgcaggacctttccccctccctagtgctgagctacaggccccttccgccctgcagaaggatcccgcaaacgtggattacgaggatctcttcctctactccaacgcagtggccgaggaagctgcctgcccggtgtctgcccctgaggaggtatgtatatgacaggaggctggcacctcccacctggctgaggggcaggagtggaggtggtcaacagcttccagaggaggctccttctagaatgagaatgcgatcctacagcttggtgctttaaacctttccagtgcttttgcaacaccgagattaaaattcaaactacaatctgaggtcctctttctgcctgtcacctacccagcgccagccctgctgccataccgtctgttgttcagacacaccaagctagcctcggggtctctgcgtgtgccggccccacctcaggtcctttgcacaaactgtgtgccctgcccctagatttcccatgtcttcattcatttctccttcaagtgcctccttccccaggccccagacctaaagcaacaccttctggattctccttcacattaccctgtttattcactgcagcggacttcccaaaagtgttcctcaaaatcctatttacttatgggtttacatgctccctggctgcctttccagtcagactgtgagctctgagagactggagactccatctggcttgtttgcctttgcttctcccacccctctgaaaggacctgccatattgaaggtgcttaactaatgaatctgtggagtagatgaatgaatgtatcacagcatcttggggtttgggagacctttaggcacccctaggttgaagtctaagtgctctccaagccccctgcccagcaggggaagttatgacagtggtacaaatgaaacaggctggtgtgatggacatcagtggaggtggggggtgcaagtgggggaaggcagtcagggaaggcttcctagaggaggtggcttatagctgagatctgcaaggtgaggaggagccagtcatacacacagacacagggaggacattccaggcagcgggaatggcacttgcaaaagtcctggggcttggtgtgtttggaaaacagaacaaaaaaagccagcatatagatggattggggttagtgagagagagattgtcagaagttgaagccccagggtcaggaagggccaatagtgcagggccttggagccaaggtgaggagctgggattctagtccagttgcaccagggaggagccaaaggagagtgtatgcatgggaggactttttttttttttttttttgagacggagtcttgctttgtcgaccaagctggagtggaatggcacagtctaggctcgctgcaacctccgcctcccaggttcaagcgattctcctgcctcagcctcctgagtagctgggactacaggtgcgtgctaatttttgtatttttagtagagacggggtttcaccatgttggccagactggtctcaaacccctgacctcatgatccgctcacctcggcctcccaaagtgctgggattataggcgtgagctaccacacctggccggaactggtggttttaaatgtttcctgtggctactggctgcagaaggggctttcctgggcactggtggagatggaaagaaggaggaagtgaggtgggggtggaggacagtgtcaaggtgggagggacaaaaatgagagcccaggtgtggaaagaaacatggatatttggtctgcgtagtggctcacacctgtattcccagtgctttgggaggctgagaggagaggattgcttgaggccaggactttgagaccagcctgggcaacacagcaagcccgtctccacaaaaaataaaaaaattagccaggcatggtggcgcacgcctgtagtcagctactctgggggctgaggtgggaggattgcttgagcctgggaggtcgaggctgcagtgagccatgattgcaccactgcactccagcctgggtgacaaagcaagaccctctcaaaaaaaaaaaagatttgtagagatggggtctcactacattgcccaggcaggtctcaaactcctggcctcaaaaaatcctcctgcctcagccttccaaagcactgggattacaggcatgagctatcacacctggccccacatttttgtaaagatagtattttgtaacctgtgaaaatcagataaaattcatatttccatgtttatcaataaagctatattagaacccaggcacgctcattggttcacgtgtgacctctggcatccgctacaacagcagagctacataattgagacggatggtacagcctgcaaagttgaaatatttactctctgactctttgtaaaagaagtttgccaggccaggtgcggtggctctcatctgtaatcccagcactctgggaggccgaggtgggtggatcacctgaggtaaggagttcaagaccaccagggccaacatggtgaaaccatgtctctactgaaaatacaaaaattagccaggcgtggtggtgtgcttttggttctagctacttgggaggctgaggcaggagaatcgcttgaacccaggaggtggaggttgcagtgagccgagattgtgccactgcactccagactgggcgacagagtgaaactccatctcaaaaaaaaaaaaaggaagaagaacaagtttgccaacccctgggggagacagtgaagccatttactgagacgagaaagatggggcatgggatcaggtttgggggttcacacggggacgtttctcagccacagggtgtctgggtggaacccaggctccaatttctgggacagacatggtgctctggtgggcaagctgccccaggcctcccctactctcattttcaggcctccccaaagccagtcctgtgtcaccaatcaaaggaaaggaagccgtcagcagagatgaacagaataaccaccaaggaagccacttcctcctgccccccaaaatcccctcttggagagacccgccagaaactctggaggagcctcaaaatgctccccgagagaggccagagggtccggcagcagctaaaaagccacctcgccactgtgaacttgtcgtcactcttggatgtccggagatccacggtgatctcaggccctgggaccggaaaaggcagccaagatcactcaggggatcccacctcgggggacagaggctacacggatccctgtgtggccacatctctcaaaagcccctcacagccccaggcaccaaaagacagaaaggtccccaccaggaaggccgagaggtcggtcagctgcattgaggtgaccccaggggacaggagttggcaccaaatggtagtgagagccctatcctcccaggagtccaagccagagcaccagggcttggcagagcctgagaacgaccagctcccggaggagtaccaacaaccgccaccctttgcccctgggtactgctagagaacaggtccaccctggctctgggactcgctgccaggggctgccacactcctgaatgccttaacatttcttccatggccccacaccatggcatccgggggtcttcgggaacccgggaaatggaataaagatgtttttggggtctgttcctgcactcacccatggggtgagctggttattttagcaacaatcatcagagtgacgctgatggtttggggcaccagctatacatcagccccagtgccagaccttctattcattattttacgcctcagagcaaggccctcagggagggtcatcctccatgttttgaagaagagactgaggttcagagaggataagaggcgtgaccaaggccacagagctatgggtgtcagcaccaggatttgaagccaggtgaatccgagcccttttcccatatcatctgtttgttctgttgtctaaaagcacactgcaagccgggctcagtggctcatgcctgtagtcccagcactctgtggggccgaggcaggcagatcgcttgaggtcaggagttcgagaccagcctggccaacatggtgaaaccccgtctatactaaaaaattcaaaaattacccggacgtggtggcgcatgcctgtaatcccagctacttgggagcctgaggcgggagaattgcttgaacccgggaggcagaggttgcagtgagccgagatcgcatcactgcagtccagcctggatgacagagtgagactccatctcaaaaaataaataaataaataaaaatgaaattaaaaaataaaagcacgctgcagggtctctctccaaccggagcttcgtccaggctcaactccgagtgtgtccccagcggcaccattggctgttcatgccttcctcctggggttttcatgcagatgaaggagacgagttgtgttgagggcctggtgtgcagtaggcacttggacatcatcagtgttggcttcaggagaagcacatgagcgtctttcctttaaaaagggaagaggcagccgggcgtggtggctcacacctgtaatcccagcactttgggaggtcgaggcaggtggatcatgaggtcaggagattgagaccatcctggctaacacggtgaaaccccgtctctactaaaaatacaaaaaattagccaggtgtggtggcgggcacctttagtcccagctactcgggaggctgaggcaggagaatggcgtgaacccaggaggcggagcttgcagtgagccaagatcataccactgcactccagcttgagtgacagagtgaagagtctgtctcaaaaaaaaaaaagggaagaggcagccgtgtgtggtggctcatgcctgtaatcccagcacttgaggagggtgggaggtgggaggattgctcaagcccaggatttcaagaccagcctgggcaacatggcaaggcctcgtatctacaaaaattcaaaaaattagccaggtgtagtggcacacacctgtagtcccagctatttgggaggctgagacgggaggatcatctgaccccaggagttcaaggctgcagtgagtcatgatcaccccacttcagcctgagcaacagagagagaccttgtctcagaaaagaaaaaaaaaaaaaagaaagaaaaagctggccggacgcagtggctcacacctctaatcccagcactttgggaggccaaggcaggtggatcacctgaggtcaggagttcaaaaccagcctggccaacatggtgaaaccccgtctctactaaaaactacaaaaattagccaggcatggtggcttgcgcctgtaatcccagctactcaggagactgaggcaggagaatcgcttgaacctgggaggcggaggttgcagtgagccaagaccaagccactgcactccagcctgggtgacagagcaagactccagactgggtgacagagcaagactccatctcaaaaaaaaaaaaggctggggacggaggaggcatcacagggccatgatggtggagggctctggagggaatcctaggttgtggggctgtgtgacctttggcaagtctagacatctctgggcctactttcttacctggaaaatgagaagagcagtccctcttcaggatgaactggcagaatgcatgtaaaacctgggactttggtgcacagtaggtgtttttctttttttttctttttctttgagacggaggagttttggtctgtcgcccaggctggagtgcagtggttcgacctcggtccactgcaacctctgcctcctggttcaattgattctcctgcctcagcctcctgagtagctgggactacaggaatgcaccaccacatccagttactttttgtatttttggtagagacagggtttcaccatgctgcccaggctggtctcgaattgctgggctcaggcgatctacccgcctcagcctcccaaagtgttgggattacaggcgtgagccactgtgcctggctcctttttttttttttttttggacagagtctcgctctattgcccaggctggagtgcagtagcacgatctctggtcactacaacttccctttcctgggctcaagcgatcctcccacctcagcctcccaagtagctgggactacaggcatgcaccaccacacccagctaatttttgtatttttggtagagacagggtttcaccacgttgctgaggctggtctcaaattcttgggctcagacaatctgcccaccttggcctcccaaatgctggggttacaggcttgagccaccgtgcccagcccagtagctgcttaatttattagcgggttaagatgggagtgagctctctagacatgacatactgtacaatggaggtgtctgggaaggtccctaggggctggtcttggttgcaggagtgactactccttggactgactggggcatagatgggggccctggggcaaccccaggtggagggggtgtggggttccccaaatgtacaaggttcagacatctgggatctggtatgaggtgcacctgggttcaagcccgcccctgcaaatgacttgtggggtggccttaggcaagtcactctgctccctccaaatgagggcatgatcctcggccaactctgcagggatgttatagggggtcagtgtcacgttagggggcagatgcatcataaactgtaaagtgcagcagccacctcagtgaatgacatttccacccctcccaatcagtggtctcctcttggcagctctaatgagtcagcccgggaggaaaagtttcaatccctttgatgactcagggtttgagggataaaaagaaacttgagtagtgaagggtgaggtttggccttcagagtgggaaccctggggtaggacagcacgggcccgatctccccaccacctcacctccgccacggacacccacaacaaggcatttccagccttcacagtgaagacgatctaggagtcaccccttccttgtacaaacagggagatcgtggcccagagagggtgtggccacactcagggtcacacagcaaagtcaaagataaaattctacgccgcctccctcccatcttccagttttaaggtggaaaaatgtgtcctcccagcaggtgtgactcagtgacttgtgtttattctcagaaaccagagtccacagcgggtgaggggtcaccccgccctcctatagctcggctcctctgtggtgccatcagattcggatgtggaaggtgctgtgtgcagagagaaaaggagtcaaggccttcaaggagtggacaaccccttttcctcctccccctcaacacgctcacggcaagtccctgggacaggcaggaaggatgccacatggacccctcaaacaaccctaggccgggagacccctacaggggctgagagcacatgcctttaattttttaattcttttttttttttttttttttttgagatggggtcttgctctgtctcccaggctgtagtgcagtggtgtgatcttggctcactgcaacctctgcctcctgggttcaagtgattctcatgcctcagcctcccgagtagctaggattacaggtgcatgataccacgcccagttaatttttctattttcagtagaaacggagtttctcaacttgctttgttgcccaggctggtctggaactcctgtgctcaagcgatccacccaccttagcttcccaaagtgctaggattacaggcatgaatcaccacatcctgccatatgatataaagtttcaaatagctagaagaaggatactgaatgttctcaacacaaataaatgatacatgtttgagatgatggatatgctaatgaccctgatctgctcatcatacattatatgtatcgaaaccattatgtggcctggtgcagtgactcacccctgtaatctcaggactttgggaggccaaggcaggaggatcagttgaggccaggagtttgagaacagcctgggcaacaaggcaagaccttgtctccacaaaaaaaaaaaaaaaaaaaaaaagtttttagttagctaggcgtggtggtgtgtgcccgtactcccagctactcaggaggctgaggtgggaggattgctcttgagcccaggaggtagaggctgcagtgagctatgattgtgccactgcactccagcctgggcaacaaagtgagaccctgtctcaacattttcagcactgcctcagcttatagataaaaacaaaaacaggccgggcatgacggctcacgcctgtaatcccagcactttgggaggccaagatggacagatcacctgaggtcaggagttcaagaccagcctggccaacatggcgaaaccttatctctactaaaaaaatacaaaaattaaccgggcgtggtggcgggcgcctgtaattccagatactcgggaggctgaggcagggagaagtgcttgaacctgcgaggtggaggttgctgtgagccgagatcgtgccactgcactccatcctgggtgacagagcgagactccatctcaaaaaaataaaataaaataaattaattaattaataaaataaaacaaacaaaattagccaggcacagtggcacgtacctgtagtcccagctacttggtttattcttattttatttcttttttcttttcttttcttttttttttttttttttttttgagacagagtctcgctcaagctggagtacagtggcgcaatcgtggctcactgcaaacctccacctcccaggttcgggttcaagttactctcctgcctcagcctcccgagtagctgggactagaggtgtgccccaccatgcccaggctaatttttgtatttttagtagagactactgcctcagcctcctaaaatgctgggattacaggtgtgagccactgcgctcggccccgtagtcccagctacttaggaagctgaggtgggaggatctcttgagccgaggagttagaggctgcagtgagccgattgcaccatgcactgcagtctgggtcactgagtgagaccctgtctcaaaacaaacaaacgggctgggcgtggtggctcacgcttgtactcccagcagtctgggaggccacagtaggtgaatcacttgaggtcaggagttcaagaccagcctggccaacatgacaaaaccctgtctctactaaaaatacaaaaattagctgggcatggtggcacgtgcctgtaatcccagctactcgggaggctgaggcaggagaatcacttgaacccaggaggtggaagttgcagtgagctgagattgcaccactgcactccagcctgggcaacagagcaagactccgtctcaaaacaaacaaacaaacaaaaagaaacatcactgtgtaccccatgaatatgtacaatcattatttgtcaattcaaaaaataaaaaataaagtgaaatttaaaaattataagataataatagcaacagcaatttattaaacacctattgtgtgccaggagctgtgctgaattttctccatatattaatttggggttcagcaaacctttttctgtaaatggccaaatagttgatgttttcaactttataccatgacgcaactctgttgttgaagcacacaagcagccatagacaaaatgtacacaaatgggtgtggctgtgagccaatacaactttactgatggacacagaaaagtgaatttcgtatcactgtcacgtgtcatggaataatctttttttaaattaaaaaaaaatttttaatgtgtttatttatttttgagacagaatctcactctgtgacccaggctggagtgcatggcacaatctgagctcactgcggccttgacctcctgggctcaagcaatcctcccgcctcagcctcccaagtagctgggactacaggcatgcaccaccatacctggctatttatttatttatttatttgtagatatggactctccttatgttccccagtttggtctcaagctcctggggtcaagagatcctccccacttagcctcccaaagtgctgggattaaaggcatgaaccaccccacctggttggaatattattattctttgattgttttttgatcttttgaaaatataaaagccattcttagctcacaggaggtacaaaaccaggctttgggtcagactggcctattggccgtactttgccctgcagtggcggctgattttccccaaaggctgccaagtacagttacacagtctgttcactgcaaactgttcaggcaacaagggctgaagtccagccacattctgcttgctgaaagaggtgtatccactcgcaagaggtgcccagggggtccctaattatccccattttacagatgcagggactgagactagggaaattgagaaagtttcccaaggtcatgaaagaatgaatagaggaattttcagaaacagagtctgtgaactgtctgcgtaagagccccttcagatgtgcaaatggactgtgggcggtgacggagagcatcacctgaggaagtctggtgcccggaggatcatgttctggaaatcttccagggacagccgcccatcatggtctccatcagcctcatccagcaccttctcacataccaggctcacctcctcggcactcagccccccccgcgtcagtttggtcaccgtctgctccaggtcccacgcacaaatgtagtcgtcgttgttaaaatctgcagagcaggatggatggggagtgacagcaggtggcaggagggctaggccggctgtgggcacatactgtgcccatgttacaagaaggggaaactaaggtcgggcacggtggctcacgcctgtaatcccaacactttgggaggctgaggagggtggaacacctgaggtcaggagttcgagaccagcctggccaacatggtgaaatcccatctctactaaaaatacaaaaatacccaggtgtggtggcatgcacctgtaatcccagctattcaggaggctgaggcaggagaatcacttgagcccgggaggtggaggttgcagtgagccaagatctcaccactgcactccagcctgggcagcaagacagaaactccgtccaaaaaaaaaaaaaaaaaaaaggaactgaggccctgggagggcacccgagaccctggtgtaaaatctggaacttgccttaaaattgggcagggacctgctgggagttcattcattcattcaacaagtatttatgcaatgaatttttcattcgttctttttttttttctttgagacggagtctcgctctgtcgcccaggctggagtgcagtggcacgatctcggctcactgcaacctccacctcctgggttcaagtgattctcctgcctcagcctcccaagtagctgggattacaggtgcctgccaccatgcccggctaatttttgtgtttttagtagagatgggattccccatgttggccaggctggtctcaaattcctgacctcaggtgatccacccacctcggtctcccaaagtgctaggattacaggtggaagccaccacacccaacctcattcattcatttttacaagcattgagtgcctgctgtgtgctaggcactgtaataacttttttattcactcatacaagtatttattgagcatctactatgtgtcaggcatcacagtaactgattttcattcactcactcactcaacaagtatttattgagtgcaattttcattcattcactcacttaacaagtatttattgagtgcctactgtgtcctggcactgtgataataatttttcatttactcattcaaaaaacagttatgggcccggcgcagtggctcatgcctgtaatcccagcactttgggaggtggagatgggtagatcacctaaggtcaggagttccaggccagcctggccaacatggtgaaaccccatctctactaaaattacaaaaattagcggggcgtggtgcgggtgcctgtaatcccagctactaggtaggctgaggcaggagaatcgcttgaacccagggagtggaagttgcagtgatctgagatcgcgccattgcactccagcctgggcgacaagagtgagacgctgtctcagtaaaaaaataaataaataaaaatagttattgagtgcctactatgtgccaaacactgtgacagctctttcattcatttattcaagtatttcttgaacacgtactacgtatcaagcaccatgatatctgtttttcatttattcactcactcaacaagtatttattgagtgcctactgtgtagtgggcactgtgataacttttttcatctattcactcaaaaagtactttttaactgcttactgtgcaccaggcactgtaataactttttcatttattcattcattcattcatccattcaggaagtatttattgagcacctactacatgttgggcaccataactcttttattcactcactcaacaagtattagtgtctactgtgtgccaggtactctgataactttttcattcattcattcatgcaacaagtatttattgagcacctactatgtgttgggcaccatgataactatttttcatgtactcactcaaaaagtattatggtggcagggcacggtggctcatgcctgtaatcctgccactttgggaagccgaggtgggtggatcacttgaggttaggagttcaagaccagcctggccaacatggtgaaaccccatctttactaaaaatacaaaaatttggctgggcgtggtggttcatgcctgtaatcccagcactttgggaggctgaggcgggtggatcacctgaggtcaggagttcgagaccagtctggccaacatggtgaaactccgtctctactaaaaatacaaaaaattagtcaggcgttgtggcaggcacctgtaatcaatctcagctactcagcaggctgaggcaggagaactgcttgaacccggaagacggaggttgcagtgagctgagatcgcgtcactgcactccagtctgggggacagagcaagactttgtctcacaaaaaaaaaacacacacacaaaaaaaacaagtatttattgagtgcacacaaggtgccaggcactaagataactgtttttctttcattcagtcattcaacaaatatttactgagccaggctcagatgacaggtggtgagcaaaatagatactgttggtacctttgagtcttctcagggacaaagtcaataagaagtgaacaggtcaaggaacaagaaattaagcagcattgcctggtgctagaagagaaataggatggtgggatggggggatgaatggggagaggcctacttttgacctagacttcaagggtaagaaggagccaggggagctgggtgcggtggctcacgtctgtaatcccagcactttgggaggccgaggcgggcggatcacccgaggtcaagagttcgagacaagcctggccaacatggtgaaaccccgtttctactaaaaatacaaaaattagccaggcgtgatggcacctgcctgtaatcccagctactcggaaggctgaggcagaagaatcacttgaacctgggaggcggagactgcagtaagccaagattgagccactgcactctagcctgggcaaaaagagcgaaactccatctcaaaaaaataaaaaataaaaatcaataaataaataaggagcaaggcgaaaggtgttctaggcagagggttcagcagaggcaaaggcccagaggccgaagactgtgtttgaggaacagcaaggcccatgtggctggaatagagttagcaaataaatgaggtggggaggcattggagtggggtggaggacagggccacatagggcctcaaaacccctggggagatatttgtgatgtgggtgccacccacccagttcccactccccaccccatccccatgcttcccaaccccagggccacgcacgcaccataaattttaaaagcatagtaagccttgaggtcgcggggagccatttcactcatcacggaaaacatgtccaaaaagttgtccagggtcatgtggccatccccatcctcagagaatacctgggcaatcctctggcggaaggggttgtcctggggacagaaaggaagctgggaggccatcctctgacccccaaggtctctggggtccatgtggtctcactatcagcacccaccttctgggaacctccaagtaccctccatcaagacccactccctcccatggtccctggacaggactttggacaactccaccctccacccctgtgatctgagcaaccttgccccaacttccagctcttggagcagccatgtgacccaggcaaggccaatcagagagttccattcacctggcaatagtgattggctctgtgatgggcatgtgactcaagctagccaatcagaggctgacctgggatatttttctgaaaaattgggagggaggggacctgattactgctgcttgcaaagctcacagaagctaaagctgagtggctgagaggtcccttcacagcctcaagaggtgaggctgccttagactgaaacctcttcctgggaggagccgagatatggggggagattcctgagcacatcatcagaggccctggttccagctgtacctgacactgtccctgcctctggatttttttgttgttgttcaggggcaatccattttgatccaaaccattctgtccctctcaaataaggtttttgtcacttgcaataaaatcaaccctactcacagtcagttactcaacccacaagttccccttggaggcacaaaccatgtgtcaaacatcctgctgataaaaacctgcatttagcagctcctgttacaagaagaactaacgttctctgagtacttgacacacaacacaccctgtactgaatttgttgcctgtattatctcgtttcatcctcccaattctgggtgttttttgtttgttgtttgtttgtttgtttgttttttgagacagagtctcactctgtcgcccaggctggagtactgtggctagatctctgctcactgcaacctccacctcctgagttcaagcaattctcctgcctcagtctccctagtagctgggattacaggtgtgcactaccacgcccagctaatttttgtatttttagtagagacggggtttcaccatgttggccaggctggtctcgaactcctgacctcaggtgatccacccgcctcggcctcccaaagtgctgggattacaggcttgagccaccacaccagccaactctgggttttaaccctgtctctgtcacattgtagctgtgtgaccatgaacaagtgtcttaacctctctgagtctcagttttcttatctttaaaatggggataactgcagcactgacctcagaggaatgcaacgagagacatctctactattttttaccctgtttgtcccatggcctgggcataccttcagctcgggcatgctgccaatgagctcgtagggcaccttcacatcggggcaggtggtatagtcgaggggcacgagctgtggggccaggtcctggtagcgatagaagagcctgatgtggggaggaaaaagctgggaaagactgggagcagggagcaggcaagacgcttgtcccttctttgttttttgagacagagtctcggtctgtcacccaggctggagtgcagtggcacaatctcggctcactgtaacctctgcctcccgggttcaagcaattctcctgcctcagcctcccaagtagctgggattacaggcacaccctgccacgcccggctaattcttttgtatttttagtagcgacggggtttcatgttggtcaggctggtctcaaactcctgacctcagatgatccacctgacttagcctcccaaagtgttgggattacaggcgtgagccaccgcacctggccaagtcccttctctttcacattcacagctgctcactgcacactgaggtatactgggtccccaagaacactcagccctgggcctggacctcaagcatacagagcctgacacaggcacccctaacctccctgggggcagggtcaaggtgcagagagggccacaggacaaagggagactggactgggggaagcaagctagcgaggagaagggggttcctggaagaggggacattggttctgggctttgaagcatgagtaggagcttctaaagcagatggagttgggagaagggagggtgcttatggccagatcacagcaagcattcagagaatcctatataatccacacatctctggatattgtcatgttatcagcaagaccctgcctccaaagataccttcactttcataccttcccttcctctccttataatgggaggaagaggccggatgcagcggctcatgcctgtaatcccagtactttgggaggccgaggcgggtggatcaccagaggtcaggagttcgagactagcctggccaacatggtgaaaccccatctctactgaaaatacaaaaaattagctgggcgtggtgacgggcacctgtaatcccaactactcgggaggccgaggcaggagaatcacttgaacctgggagctggaggttgcagtgagctgagatcgtgtcactgcactccagcctgggcaacaagaacgagactctgtctcaaaaaaaaaaaagaaaagaaaaaagaaagaaagaggccgggcgcggtggctcacgcctgtaattccagcactttgagaggccgaggcaggtggatcacgaggacaggagatcaagaccatcctggctaacatggtgaaaccccgtctccactaaaaatataaaaatttagccaggcgtggtggtgggcgcctgtagtcccagctactccggaggctgaggcaggacaatggtgtgaacccgggaggcgcagcatgcagtgaaccgagatcaagccagtgcactccagcctgggcaacagaatgagactcggtctcaataaaaaaaataaataaataaaaaataaaaaagaaagaaagaaaagaagaaagaaagaaaaaaaaggagggattcctcaatggggcagagcagagacaaacagctaatagtcacattttttctaaagggcagacaaaagatattttgcaaataactgaataccacacacactatccagattataaggccagttctccactcagaagccctcacctgtgacaccataccttcattagggcatgctgagcagcagccttgcagagaccatccttggtgggtctgaggtccccaagctgctagggactgtctctgagagagacatgagtccctaggtcatatgatgactaggaactcaatgaaggtggggtggggagacctagaactttcatcctgaccactcagttccctgtcggggtcccatcagggaataccctgggtttaggtttctgtgtggctctgagcatgttcctctcctctccctctctgtgccttggttattctatctgataagcaagaagcttgggacagacaaaatgtctgtccttggggccttggggctctgtgcatttacccttcagcctgggatcagccccgccctgtctgagcctcagtttccccatcagtaatttgatcgtgatggccgaggtgaccctgcaagctgtcctcacccaaacaatggggctcactagtaaaaggtgtggccatcaataatggatgtcctgttactacacaactggggccttggccccgatcacactgcagctgaaccctggccagcttgggtttcatagctccaagttcatgggtcggggcccctgggcaatggccccacaggccgagtgatgatgtgggatactcatctgtgcccatcgtgctgggtcacgccagggacctgcagcagccttgggccacctcctcacaccctcatcttaatgccaagcccacaacccagactgggctctggactttgcacctgggctcccagcctcaagtcccagtctcaggagaatctttatctttcattttgtttttctgaggcagagtctagctctgtcacccaggctggagcacagtggcgtgatctcggctcactgcaacctccacctcccaggttcaagcaattctcctgcctcagcctcttgagtagctgggattacaggcacccaccacctcgcccagctgatttttgtattattagcagagatggggtttcaccatgttggccaggctgatcttaaactcctgacctcaggtgatccacccaccttgtcctcccaaagtgctgggattacaggcatgagccaccgcgcccagcctcaggagaatctttctaacgtgctgatggtctctcccctgctcatgcatgctccatagctccctgccacccttgggagaaagcccaagctcatcagcctagagactgggacagtatgacaagatgtgacttgtcagcttctccatctctgcctctgtccactgaccacacctgccccccttccccatttgagtcccaacaaattggaaataccagttgggcatggtggctcacacctgtaatcccagcactttgggaggctgaggcagggggatcgcttgagcccaagggtttaagaccagcctgggcaacatagtgagagccccatctctataaaaaaatacaaaaatgaggtacatgtggtggctcgcaccagtggtcctagctactcgagaggctgaggtgggaggatcacctgaccttgggagatcgagcctgcaatgagccatgattgcaccactgcactccagcccaggcaatagagacagaccctgtctcaaaaaaaaagaaaagaaggaaggaaggaaggaagggagggagggagggagagagagagagaaaagagaaagaaagaaagaaagactacttacacacacacacacacacacacacacacacacacacacacacaccaaattgcaaatatcctccagcaatgaatagaaagttgtttttccagatcttctctcccttcctccctggactgacctcatgatctccttccttgtgaaaaatgtgcagtcctgtggagagaggtgttgtcttaacccgaaccctgcctctggggcctcctcccacggcctcctccctccaccccacactcacacagatggcctgatgctgccacacacagagcagaaccaggaacccaggcggacggtacacccagatgaaggcattctgttcccatttcccagaccacggaaccaaagttgtcaaacccactgaggacccatcctgcccccctctacctgatacgcttccagctgctcgtgtgtgaagactgtctgcttgttgcccatggtgtgaaccacagcccagacttggggatgcaccccaaaggctcccagcttcctcggggccacacgggttgccaggctgttgtgtaccagtgtctgggcaaatctccctgccctggctgtcacccacccacctacgccatcaccccctgcttgatgagactcaaattacagccaggctctctggacaacagcctgaatgtgtccatgggtaaggataagggctgtgggatgtcacagagaagacctcagtggggaggccacatctgccaccacaaggtgaggctggggttatggggcacactcaagagacaggcagggtatacagaagggctatgggcacactgcagctcaaatcccagctctctgcccactagctgtgtggccctgggcaagtcacctgacttctctgaacctcattcatgagatgaaaattacattatacctacctcatagggtcattctcaggatctgagatttaaaaaaaaaaaaaaaaggttttgactgggcaaggtggctcacacctgtaatcccagcactttgggagggccaggcaggcggatcacctgaggtcaggagttcaagaccagcctggccaacacggcaaaaccccatctctactaaaaatacaaaaattagcttggcattgtgacacatgcctgtaatcccagctactccagagactgaggcaggagaattgcttgaacccaggaggtggaggttgcagtgagccgagatcccgccattgcactccagactgggtgacagagtaagactccatctccaaaaaaaaaaaaaaggttttggctgggcgaggtggctcatacctgtaatcccagcactttaggaggacaaagcatgagattcacttgaggccaggagttcaagatcagcttgggcagcatggcaaggccctatctctactaaaaatacaaaaattagctggatgtggtggtgcatgcctgtggtcccagctactcaggaggctgaggtgggaggattgcttgagcccaggagtttgaggctgcagtgagccatgattgcatcactgcattgggaacataatggtgaacaagctagatgaagttctggggtgtgcattgacattattattttattacattttatttttttgagacagtctcactctgttgcccaggctggagtgcagtggtgtgatctcggttcactgcaatctctgcctcccaggttcaagtgattctcctgcctcagcatcccaggtagctgggaccacaggtgtccaccatgccaagctaattttttttgtattttttttttttgagacggagtctcgctctgtcacccagtctagggtgcagtggcgtgatctcggctcactgcaagctccacctcccgagttcaggccattctcctgcctcagcctcccgagtagctgggattattacaggcgcccaccaccacgcctggctaagttttgtatttttagtagagacagagtttcactatgttggccaggctggtctcgaactcctgacctcaggtgatccacccgcctcggcctcccaaagtgctggaattacatgtgtgagccacctcgcccggcccaaagggcagatctaatgtagcagctaccaactttattaaggcccagaatcctcttgggtggagaatctgagagtctaaatttcttagcctggccctccatgcccttctcactttgggtctcacctgtgttttctctacctggcctggactattgcaatgtttcccagcaggctttcctgcctcggcctcatcaagcatcctctgccaaatctgtgcagtcatcttgtaaaatgtgaccctgatcaggcttgaaagatgcctcaaggatgacttttttttttttttgagacagggtctcactctgtcacccaggctggagagcagtgatacaatcatggctcactgcagcgaccctccttcctcagcctcccaggtagctggcactagaggcacatgctgccacatccggctaatttttttttttttgtattttttgtggagacagggtctgtctatgttgcccaggctggtcttgaacacctggcctcaagtgatctacccaccttagcctcccaaagtgctgggattacaggcatgaaccaccatgcccagccatccaagaataactttcaaaaaataaacaatatcaagtgttggtgagggtatggagcaactggaatgctcatacattgctggtgttgatgcaaaatggtatagacactctggaaaataggttggctgggttttttttaaatagaattaaacttaaccttaccacaagattcagggcctggtatggtggctcatgcctgtaatcccagcactttgggaggccaaggcaagaggaccactttagcccaggagttggagaccagcctaggcaacatggtgaagccccatctctacaaaaatacaaaaattagccaggtttggtggtatccagctacttgggaggtttgcttgaggtagggaggtcgaggatgaagtgagctatgatcactccactgtactgcactccagcctgggagacagagtgagatcctgtctcaaaaaaaaaaaaaaaaaaagactcctgggtgtttacccaagggaaataaaaacctatgttcaactgagagtgacccctaatgtaaactatccactaaccactgtgggtgataatgatgtatcagtgtcagttcatcaattgtaacagactagctactgtcatgcacttgcatgtggaggatgttgattgtaggggaagctatacaagtatgaaagcagcaggtgtacgggaaatctctgtaccttctgatcaattttgctgtgaaactaagactgctctaaaaaaataaagtatagtgtaaaaaaaaaatttaaactaggttcacacaaaaacctgtcatgcccacagaatgggacaaatgctcagtgctcaagtcatttatataaaatggcataatatttgcatatagcctgtgcacatcttccatacactttatttatttatttatttatttttattttactttttcgagttggagtctggctctgtcacccaggctggagtgcagtggcgtaatctcagcccactgcaacctctgcctcctaggttcaagcaattctcctgcctcagcctccctagtagctgggattacaggtgcacaccactgtgtccagctaatttttatatttttagtagagacggggttttgccatgttggccaggctggtcacaaactcctgacctcaagtgatccggcccaccttggcctctcaaaatgctgggattacatgggccaccatgcccggccctccatagactttaaattatctctaaattatgtataatatctaatgaaatataaatgctacataaataattgttacacatttttatttgtattctttttattgttgtattatttttattttattggttccaggtattttcactccgtggtttattgaatccatggataaggaaactggatatgaagggctaactgtatttgtgaatcatatatctcataaggaactactattcagaatatataaagaactctcagggccgggcgcacgcctgtaatcccagcactttgggagaatgaggtgggtggatcacctgaggtcaggagttagagaccagcctggccaacatagtgaaaccctgtctctactaaaaatacaaaaaattagccaggtgtggtggtgggcgcctgtaatcccagctactcgggaggctgagacaggaaaatcgcttgaacctgggagggggaggttgcagtgagctgagatcgtgccactgcactccagcctgggcaacaagagcgagactctatctcgaaaaaaaccaaaaaacaaaacccacgataaaaactaagaactcttacatctcaaaactagaaagacaacccaaataaaaacattatgctgatcaaggtaacttttgcaaaaaagagaaaagaagaaaacaaaaacattatgttgagtgaaagaagctagagatgaacagtcccatatagtgtgattctatttacatgaaatgtgcacaccaccacacctggctaattttttaaatttttgtagagatgggatctcaccatgtcgttcagactcgtctctaccttctgagctcaactgatcctcccacctcaccctcctaagtagctgggaccacaggcaggtgccaccgcactcgctaattttttgtattttttttttattccacttgggtaaatatcgaggggtaggattaatggctcatattcagtatataagaaacttgccaaacttcttcctaaagaggctgcactagtttgctttctcaccatcagtgtttgtaggttctagttatttcacatcttctccagcagttactattttcagttttttatttacttttatattttaattaattaattaattaatttatttatttatttatttatttatttcttgagacagagtctcgctctgtcgcccaggctggagtgcagtggcgcaatctctgctcactgcaagctccgcctcccaggttcccaccattctcctgcctcagcctcccgagtagctaggactacaggcgcccaccaccacacccggctaattttttatatttttagcagagatggggtttcaccgtgttagccaggatggtctcgatctcctgacctcgtgatctgcattttttgtattttttgtagagatgaggtctcaatatgttgctcaagctgttctcaaacttttgggctcaagtgatcctcttgcctcagcctcccaaagtgtttggattgcacaccaggccaggtgtgagtcagcctggcatagaaaatttacacccagcctgacatagaaaaattaattttggccaggcgaggtggctcacacctgtaatcccagcattttgggaggccaaggtgggtggatcacctgaggtcaggagttcgagaccaacctggccaacacggagaaaccctgtctctactaaaaatatataaacgagccaggcgtagtggcacatgcctgtaatcctagctactctggaggctgaagcaggagaatcacttgaacccaggaggcggaggttatggtgagctgagatcgcgccacggcactccagcctgggtgacagagtgagactccgtctcaaaaaaaccaaaccaaaccaaaacaacaacaacaacaacaaaagacaacaagtgttgtcaggggtgtggagaaattggaacacttacatagttggtgggaatgcaaaatggtgtagctgctatggaaaacagtatgaaggttcaaaaaaaattaaaactatcagccgggcacagcagctcacacctgtattcctagcactttgggaagccaaggcgggtggatcacttgatctcaggagttcaagaccagcctgggaaacatgatgaaactttgtctttacaaaaaatacaaaatctagacagatgtggtggcatgctctatggtaccagctattgggaggctgaggtgggagtattgcttgagcccaggaggttgaggctgcagtgagtcatgattgtgccactgtactccaacctgggcaacagaccctgtctctaaaaacagaagaggaagaagaagaaggcaaatcacacattgtgttcttaccacaatgtcttagggggttttttgtttgttttttgagatgaagtttcgctcttgtcgcccaggctggagtgcaatagcgtgatctcagctcattgcaacctccacctaccgggttcaagtgattctcccgcctcagcctcctgagtagctgagattacaggcgcccgccaccacactcggctaatttttatatttttagtagagacggggtttcaccatgttgatcaggctggtcttgaactcctgacctcaggtgatccacccgcctcggcttcccaaagtgctgggattacaggtgtgagccacctcgcccagactttaccattatttttttgttccgcttcccaaagtgttgggattacaggcatgagccaccacacccagcctttatcacaattttttgttaatgtagtttaaatatgcagctaccgtaattacacttttgggcaatttcaaaggaatggaaacttatgttcacataaaaatctgtaacagatgttttatcttaataaccccaaactggaaacaacccacatgtgaatgtttaagcaaatggatacgtccataccatagaaaattactggagaatagaaaaggtaaatattacgacttggatgaacttctagggcattatgctgagtggaaaacaaaccaatcctagcaggttacatattgtatgattccatttatatcacattctttttttttttttgagacggagtctcgctctgtcgcccaggctggagtgcagtggcgtgatctccgctcactgcaagctccgccttccaggttcacgccattctctttcctcagcctcccgagtagctgggactacaggtgcccgccaccacgcccggctaatttttttgtatttttcttagtagagacggggtttcagcgtgttagccaagatggtctcgatctcctaacctcgtgttccacccacctcggcctcccaaagttctgggattacaggcgtgagccaccgtgcctggctatatcacattcttaaaatgaatgacaacatcagagaaatagagaacagatccctgtttgccagctgtgcaggaatggaggtgaggggataagtgtgtatggctacaaaagagcaacaagaggaatttttttttttaaagacagggtctcactctgtcgcctaggctcgagtgcagtggtgccatcatagctcactgcagccccaaactccctggctgaagcaatcctcctgcctcagcctcttgagtagctaggactacaagcacctgccaccaaacccagctaacttttgtattttgggaggagacagggtttcaccatgttgcccaggctggtgttgaactccttggctcaagggatctgcccgcttcagactcccaaagtgctgggattacagacgtgaaccaccatgcctcgcctctgtttatttcttaaaactgcatgtgagccttcaattatttcaaattaaaagtttaattaaaaaaattacttcccctccatttaaacacattttgtttcacattttaatacctccaaaatcaagatgcatctcgaaagtactgttggagcattctcattgcctatacatgcacacccattaaaagcatccgcttcaaaactcacagaatggaggcagaggctaggaagaaaatcccctaggatgtgaggaatgggggtgtggaatcccatgcgcttagctacattcctgaagtgggagctcactcagcaagcctgacattattgcaaagctggctagaaagtcaagccccaccctcacttaattcctttacagattctttcttttccctttttttttttttggagatggagtcttgcagtcttgctctgtcactcaggctagagtacagtagtgtgacctcggctcactgcaacttccgcctcccaagttcaggtgattctcctgcctcagcctcccgagtagctgggattacaggcgcctgccaccacgcctggctaatttttgtattttcagtagacacagagtttcgccatgttggccaagctgttcttgaactcctgacctcaggggaaccacccgcctcagcatcccaaggtgctgggattacaggcatgagccaccatgcccagcctctttcttttcctaataaacttttagttttgaaataattttaaatttacattaaaattgcaaggatgggctgggcgcagtggctcacacctgtaatccctgaactttgggaggcaaaggcaggcagatcacttgaggtcaggagttcgagaccagcctggccaacatggagaaaccccatttctactaaaaatacaaaaaattagccatacgtggtggtatgtgcctgtagtcccagctactcgggaggctgaggcaggagaatcgcttgaacctgggaggcagaggttgtagtaagcgagatcgcgctgctgcactccggcctggatgacagagcaagactctgtctcaaaaaaaaaaaaaaaaaatagccggatgtggtggcacatgtgtgtaatcccacctactgcaggggctgaggcaggagaattgcctgaacctgggaggtcgaggttgcagtgagccaagatcgtgccactgcactccagcctgggtgacagagtgagactccatttcaataaacaaattaactaatttaatttaagtgcaaggatgatacagacagctcccataacccttttgacctgcttcctctaatggttttttttttttgttatttatttatttatttatttttgagatgtagtctcaccgtgtcacccacgctggagtgaaatagcaaatggcaaaatctcggctcactgcaacctctgcctcctgggttcaagcgattctcctgcctcagcctacccagtagctggggctacaggtgtgcgtcactacgcctggctaatttttgtattttcagtagaggcgcagtttcatcatgttggccaggctagtctcaaactcctgacttcaaatgatccacccgcctcggctcccaaagtgctgggattacaggtgtgagccactgagcccggctctaatgttaacatcttacacaaccacagcatatttagcactactaagaatttaacattggcacgttactatttctttttctttttttgtagtttttttttaatttgtattcaagactcaacataatcattttcttttcctttttttttttttttttttttttgagatagggtcttgctctagtgcccaagctagagtgcatcaatcaagatcctaaatcactgcaccctcgaacacctacacccaggctcaagtgatcctcctgccttagcctcccgaggagctgagaccgcaggtgtgccccgccacatccggctaatttttttcttttcttttttttttttttttttttttttgagacggagtcttgctctgtcgccagggcggagtgcagtggcacgatctccgctcactgcaacctccgcctcccgggttcaagtgattctccgcctcaagcctcctgagcagctgggattacaggctcgcgccaccacgcccggctaattttttttatttttagtagagacggggtttcaccatgttggccaagatggtctccatctcctgacctcgtgagccgcccgcctcggcctcccaaagtgctgggattacaggtgtgagccaccgcgcccggcaaaaagatcgccttgcttttgacacaaaagtgctggcagcccccatcccctggtaccagaagcccctctgcacagtcttttccaggtgtggacggataattaggcagtgacttgctgccccctgcaggtaagactgagaaaggcagcccctgtgccctcctttttcttgtgtccggtagatttggggacgtttgcttctctcttctccacctcctttgccttctccccactaccccaccccccgccagcaattaaaaaaaaaaagccaccctggcacaatttggacaaaatctatgagaaataaaacgtgcaaacgtgcataaccttggacctagtaattccattggttgcaaaagtcagccaagatttgtgggcacggattgtgttcattcatttatctagggcagtattagggctgtttctaatttgttggctattacaaataaatctgcagtgaacattcatttacacaattttatatgggtctatactttcatttcacttgggttaaaacgtaggaatctaattcttttgtcatagtataagtgaatgcttaatcttttaaagaactgtcagactgatttctaaactgtttatgccattttacattcacaacagcagcacgtttgagttccagtttcaacacatcttcacagatacttggtaggcacagcctttttaaatttttcccataatagtttttttttttactaggtttttgatacagagggaaatagagaagaaaccaaaaattccgatagtcctctgctgacattaaaaagatatattcaagggccgggcacggtggctcacgcctgtaatcccagcactttgggaggctgaggcaggcggatcacctgagttcaggagttcgaaaccagcctggacaacatggcaaaaccctatctctactaaaaatacaaaaattagcggggcatggtggtgggcgcctgtaatcccagctactcaggaggctgaagcaggagaatctcttgaacctgggaggtggaagttgcagtgagccaaaatcgtgccactgcattccagcctgggcaacagagcgagactctgtctcaaaaaaaaaaaaaaagatatatgcatgtacacatcgtatgtaagaaaaccgcacagtactgaaaggatgaaaagaaagaaagaaagggccaggggtggtggctcacgcctgtaattctaatgcttcaggaggactgcttgaggacaggagtttgagaccaacctggacaacacagcaataccctatctctattgattttttttttttttttttttttttgagacggagtctttgtctgttgaccaggctggagtgcagtggtgcgattttggctcactgcaacctccgactcccgggttcaagcgcttctcctgcctcagcctaccaagtagctgagactacaagcgcaggctactatgcccagctaatttttgctttttgtgttttgttttgttttgttttagtagatacagggtttcgccatgttggccacgctggtttccaacacctgacctcacgtgaaccgcctaccttggtctcccaaagtgctgatttaaatatatatgtactttttttttgagatggagtctctctctgtcgcccaggctggagtgcagtggtgtgatttcagctcactgcaacctccgcctcccgggttcaagcgattctcctgcctcagcctcccgagtagctgagactacaggcgcccgccaccacgcccaggtaattttttgtatttttagtagagacggggtttcaccgtgttagccagaatggtctccatctcctgacctcgtgatccgcccacctcgttttcccaaagtgctgggattacaggcgtgagccaccgcgcccggcataaaatagatttttaattgttttaacataccaccaaccttgtcacatgatattgtcatttacctaaagctgaaaaattaatgaatactgattaggtttacaaaattaggttcagctatccagtgaacgctcaaaatatggcaataaaagagaacgggggtggtggggcgtggctcaggcctgtgatccctgcgctttggaaggccgaagcaggaggatcacttgaacccacgagttcgagaccagcctggacaacacagcgagaccccatctcgacaaaaaaatttaaatgaaaatattagccgcgctcagtggcgcccgtctgcagtctgctactggggaggctgaggcgggaggatctcttgagcccaagggttcaaggctgcagtgagccacgatcgcgccactccactccagcctaggtgacagaccaagatcgtgtctctaaaaaagaaaaaaaaatcaaggagagagaacaggtcacccaaaagtgcgcaaaacgctcaaaaaggggttgggtttccagcaccctgtgtgaagaatgggagaccggaagtgggcgccaaattcggaagtgtggcagcagataggaatcgaagggcactcattcgcttggctctctgtcccgcccactacccggaagtgtggcccgggtccagaaccaagagcgcatgctcaccttgtagctcagccaatcaaagagaagcgaggcggccattcgggcggaaatagtgtttgcaaacaggaagtgtggcactccagctaccgaagcactggagagtgtcatggaggcctacgagcaggtccaaaagggacccctgaagctgaaaggcgtcgcagagctgggagtgaccaagcggtgaggcccgagggcccgcgggattccgtcttcatcccccttagaccttttctcgggacccctggccctgatcctccgacccgccgcctcctcatgtctttttccaggaagaagaaaaagaaggacaaagacaaagcgaaactcctggaagcaatgggaacgagcaaaaagaacgaggaggagaagcggcgcggcctggacaagcggaccccggcccaggcggccttcgagaaaatgcaggagaagcgggtgagcagaagcagaaggcggcggggaggcgggaacacccggcgccgggagactggaaattggggtcagggctgggacgctccgagggcaggggagcggtcagaggagaccttaattacggggagaggatgctgtacgtgagtgagagaagagtcgccctctgccgggggagctccaaggatgagaagaccccgctggcccgagtgggcagcagaggggagagctagaactggcgttgaaaggaggccagagctggagacccgggtttggattccagtgctgtggcttatttgccctgcgacactaggccagtgactttcttatttccgtgcctcaagtttcctcttctgtacgagtcagggtagtaacttattctaagagggttgggaacttgagaggaagtcatgaaagtaaaaagcagtgcatacatgttcagtggatgccagctcttgatattaaatggccatgctcgccgctcgaagtcaccacaaagtttgtttccaagacaactttgtttggcagattcaaacatgctgtattttttaaaaaattagttatttttggcggggtcagagcactgcagcctctgcctccggggttcaagcaattctcctgcctcagcctcccgagtagctgggattgcaggcgcccgccaccacacctggctaattttggtatttttcgtagagatgcggtttcaccatgttggccaggctgatctcgaacttctgatctcaagtgatccgcccgcctcagcttcccaaagtgctgggattacaggcgtgagccaccgcacccagtctcagctgttgatattgaatggccatgcccatgacgactttgtttgtattgtattataaggctccgataaattattttttcttaacaccataaatgtgtgcagtggagaacagaagagttcacagtaagacagaaactgggtccattatgctggggagagggaataatcagtgtaggtcagtgattctcacctgggggtagtctccacccccctaaactcccaccccgaagcacatgtggcaatgtctggaaacatttttggttctcaactgggttggggtggggactactggcaactagtggctagaggccagggatgacaccacacaccctgcgatacacaggacagcctgccgcagcaaagagtgatccggctccaaatgtcagtagcactgaggctgagaaaccctaaccctggtctaggtgattctgtacggtgacactggggaaaatggaccttggggacaattaactccttactcccagatctaattcaggcatacagaaaacacatggatgcactacctctggcatgacagacctgagtttgactctgcctctaccacaaattagtggtgtgaccctgggcaagccggctacctattacttaaagtagcactaaagtctgcctcacagggttgtggtaaggatttaacaagtcaggcgggcggatcacgaagtcaggagttcaagaccagcctggccaacatggtgaaaccctgtctctactaaaaatacaaaaattagccgggcatggtggcacacacctgtaatcccagctacttgggaggctgaggcaggaggattgcttgaaccagtacccgggaggcagaggttgcagcgagccgagatcacgtcactgcactccaggctggcaacagagtgagactccgtctcagtgagactcagtctggctctgtcaccgaggctggaatgcagtggctcgatctcggctcactgcaacctccgcctccggggttcaagcgattctcctgcctcagcctcctgagtagctgggattacaggcgcctgccacgacgcccatctaatttttttgtatttttagtagagatggagttccaccacgttagccaggctgttcttgaacccctgacctcaggtgatccgcctgcttcagcctcccaaattgctgggattacaggcgtgagccaccacgcccggcctttttttaattttttgaaaaagcctcgctctgttgtccaggctggagtgcattggtatgatctcagctcactgcaacctctgcctcctgggttcaagcgattctcctgccttagcctcctgagtagctgggactacaggcgcccaccaccatgcccagctaatttttgtatttttagtagagacggggtttcaccatgttggccaggctggtctcgctctcctgacctcaagtgattcacccgcctcagcctcccaaagtgctgggattacaggcgtgaaccaccatgcctggccaagtaaatgcatttctttcccttctaaccctgaggttgtagtcagaggcagggctgagattttattgctggaagccagaatgagacttatgcgagacttaggcagctattaagagactaataatgggagctcagagtagagcagtcgtgatggagccagtggaaggtaacaggtttggaataggttttcaaggatgaattcagggttagctgttgggttggatgtaagctgggaaagaaagaagagtcaaggatgaccaagactttgggctgggcagtttgatgaatgaaggtgctgtttactggggtgggaaggattgcaggtaaagcaggttttctggagtgggagttgagggagggggaaccaaagctatagttttaaagaaggtaaatgcagtgccccagtagaaatccaagtggagtcagccaggcacagtggctcatgcctgtaatcccaacattttgggaggccgatgtgggaagatcagttgagcccaggagttcaggactagcctgggcaacatagcgataccctgtctcttcaaaaactaaaatagtagctgggtgtcacgcctgtgggcagagcccagccaggtgcctggcattgtgtggcagctggacaagtcagtgtggcttctcacagggagacacaggctttggctgggctcacagcagcaggaagagggacagagatgggcagggcactcgccttagagggagaatcagccaggtgagggctgactggacacaggaggtgagggaatgaaggagaagggggggacagagaggagcagccaggtggcccctaccaataatatctcatgatgctctgggttgactgggcttagcagggtctgacctcacttggagtctggtgtggtcagatggcagctgggcctggagtctctgaaggtgcagctgggctgcagcatctaagatggctttgtcgccatatagctggtgcctcagtgcttctttttttttttttttttttttttgagacagtctcgttctgttgcccaggctggagtgcaatggcaagatctcagctcactgtaacctccacctcccgggttcaagctattctcctgcctcagcctcccaagtagccgggactacaggcgcatgccaccacacctggctaatttttgtatttttagtagagacggggtttcaccatgttggccaggctggtctcaaactcctggcctcaagtgatcctcccaccttggcctcccaaagtgctgagattacagacatgagccgccatgccccacctctcagtgcttctttcgtggcctcttccttcatgtcatctcatcttccaggtcctttctttccagcagggccatcagacttcctgcacagcaactggcttccaagggcacaaagctaatgctgccaggtcttatgcatggacccagaactggtactgtgttccttcgagttaactgagtccacggccaggtcagagtcagtgtggcatggggactgcacaagggatgaatcataggcagcacagttataggggccaccaaagagtgggccacagtcacccagccaggaagtgtggagccaggtgtggcctcagatctgtctggctttatatcccacactccaactcttttttttttttttttttttttttttgacagggtctctctctctgtcacccaggctggagtgcattggtgtgatcatagctcactgcagcctcaacctcctgggtcaagcagtcctctcaccccagcctcttgagtagctgggaccacaggtgtgcaccaccaaaatcagctgattttcttgtagagttggggtctccttatgttgcccaggctagtcttgaactcctgggctcaagctatcctcctgccttagcctcccaaagtgctgggattacaggcatgagccaccgcgcccagcccacactcccagctgctaccagatactgacctttccaggtgtcattgagtgtttgaagtgaggatcagagcaggtcatggtgcaggaggcatatttcagaataaccctggggatggtgatcctggtcttgtagccctaacatcaggatgggaagtgtcacttgagcacctgctctatgtcagaccctttacctctctctttctcatcattcctgaaacccgctctgggactttgttttcctccaaactgggagtgctaacagcctcctcaggatgcaggaagcatgccgacagctcccagcagagtctgctcatgggtacgcgctcaggcattgctggttcatttcctgccactcacgaagctggcaagtgacctgggttccctgttggaccagcctgggtggagttgagggagggggacaaggcacagagcctgaaacctccagctgttctaaatgtgagagccagtctggccaggctccatcttccaccccatgccagcctgggctgtgttgagcctgtaaactcacctccatgtctcttctctctccagcaaatggaaaggatcctaaagaaggcatccaaaacccacaagcagagagtggaggtgagtcgccgtgtccagtgggggagactgagccattcagggtcccagctgggcccagaggctatcagctggcagagggagctgttggcatgttgacgagaagggaagtttacctaatagaagtgacacttccccagggttattcaaaggggagcccagggttcaggagtctgtaagacctggcagggtgagtttgagaggagggggctcaggagagataggatgtgggagaggtggggctgggcagtgccacttctccccagtaccccacttgggtctgcgctgacaccggccttctactccacctccccaggacttcaacagacacctggacacactcacggagcattacgacattcccaaagtcagctggacgaagtagccgcctgcccccagtatggagcagcatcgagggttcgcaaaaggccacactggggttgtgtgtgtttcctttggtatattctggaaacatggctacacacacccttgcatcttctgctacagactgcttttcgaagctgtgtaccctcattctggaacttgattaaagtaagatcgtccttgtactcagtttaggcttcttggcaacatacagaagatacacccttttcgtttggatggaaagtttctaagtttatccagaggtaaagcccattgtgtgtctgtgtcatgtaaaaatgttttcacccgagttgcatgtaacgctctgaggccagccagctgtcttctcctggatgagacagactccagagggtaaggagctagcgccatggtggcctgcagtatgcagagccccgcaggacccagcgtgggcgcccttccaagcttcctctagctttgggcctatgctgtcccctgcaggccctagggaagccacttgcaactatgcggccttcagacttcctcctcagccacctggccactgagacagcatagcctgggtaacggaacagccacctaaggcaagaatggaacggacacaccttgctcctttctgagcccgtttcccaaaaccccccttccaggtgcttctaatgggtgttgccatagcagacgctgctaatgcatcacagcattctttgaaatggaaccagacacagcctgcctctcaatcctcagctgggggctcctagcagcctcttgtatttactcagagttgacacatcacacagatcctgtttggcattcctaccttacggacgtctcaggggtgacaggaccagggcagagccccggtacaaacagacaaggctgcagtcaaatgggagggtccaggtgtccgtgttggagggctgggatcttgtagggcctgtgcgtcctggctgaggatcaaaccacatatgttattgggagaaacgatttctgttgacgtagatattgaaagaataatgaaggcagaagagaaaaacgaagtgtggaatttggggttgtcctgtgtaaattacacaataaagcaaaagtcagttattgtaagtctgagtgtcttctttttttttttcccagacagagtttcactctcttgcccaggctggagtgcagtggcataatcttggctcactgcaacctccacttcccaggttcaagtgattctcctgcctcagcctcccaagtagctgggactacaggcaaccgcgactacgcctggctaatttttgtatttttagttagaaacgggatttttccatattggccaggctgatctcgaactcctgacctcaagtgatctgccgcctcagcctcccaaagtgctgagtgtcctcttataggctgtttgtcaccaaaatgtcttttggatttgtggcacagaaaaatattcatactggaaaacggcaactcaggtggaaaaatttcgatggcacatctgttcccgcctatggttcacacctaagagagatgacacacactctcattagcagtggcttttgccagtgattctcccatggcctggtggaaagacagtttcagaccttttccttccacaagctagcagcaggagtctgcattatgtactactgtggaaaccctttattagtatagtggaaaggtagttatttcagctctttccctgcataacaaacggctccaaaaggcagtggcttaaaacaacaaaaatgtatttttattttattttattttattttattttatttttttgagatggagtcttgctctgttgcccaggctgcagtgcaatgacgcgatctcggctccctgcaacctccacctcccgggttcaagcaattctcctgcctcagcctcccaagtagctgggattataggtgcgtgccaccacgcccagctaatttttgtatttttagtagcaacagggtttcaccgttttggccgggatggtttcgatctcttgacctcttgatccacctgcctcagcctcccaaagtgctaggattataggtgtgagccaccacacccggccaaaactttatttattatcacaactctggcttgactgtgctaggctggaggattctgttccatggagtgtggttcagttcactcatttagttgtgttggctttcccggggccagaaagtccagggtggcatctcaccctccaggatctccctccacaaagcctatttctttattattgttgttattattattattatatttatttatttattttgagacagagtctcgctgtgtcgctcaggctggagtgcagtggtgcgatctcagctcactgcaacctccgcctccctggttcaagtgactctcctgcctcagcctcctgagtagctggaattgcaggcacccaccaccacgcccggctaatttttgtatgttagtaaagacagggttttaccatgttggccaggctgctctcgaactcctgacctcaagtgagtcgcctgcctcagcctcccaaagtgctgggattacagacatcagccaccacgcccggcctacatagcctatttcagcggccaaaacaagccacctagccaaacccggagtctggcagggaactccacaagggcatgaacactaggaggtgtggtttactgggatccaatacccttacagtccaccaccgctgtcctcaaatttacattagaatcacctggggagcattaaaaaccgccaagttctggtgccaggcacagtgcgacgtatgcaaatgtaatcccagctgctcaggaggctgaggctggagggttgcctgagcccaggagttcaaagcgagcctggagaacagagattcttattgtgtgtagggagtgttgtggcaggccaggtctcactaatgcaggcctccggccttcataatgactgtttaagtactgactaagtggttaattttttttttttttttggagatggcatttcgctcattgcccaggctggagtgcattggtgcgatctcggctcactgcaactctgcctcccgggttcaagcaattctcctgcctctcagcctctggagtagctgggattccaggcatgcaccaccgtgcccggctaatttttgtatttctagtagagacagggtttcggtatgttggccaggctggtctcaaactctcctgacctcaggtgatccacctgcctcggcctcccaaagtgctgcgattacaggcgtgaaccaccatgcccagccaagagaggcttttgatactaattgcccagtgattaagctctagaaggaatccgatgagatgtcaggactattattattaccattattattattttgagatggggtctcattctcttgcccaggctggagtgcagtggtgtgatcacggctcactgcagctttgacctcccaggctgaagtgatcctcccacctcgacctcctgagtagctgggatcacaagtgtacatcaccatacccagctgatttatttatctctttgtagagatagggtctccctatgttgcccaggtctcaaactactggcctcaacctcaagtgatcctcctgcctcggcctcccaaagtgttgggattgtgggtgtcagccaccaagcccggccacagctgtgacttcccactgctcaggaagaacatcagggtctgttcaccaagagttaacagaaatagacgcgatatgtaacaaaccctgttggacctagtctcatattttgccccatttattgtaatgttttagagatcttactctgttgcccaggctggagtacagtgatgccactatagctcactgcagccttgtcaacctcccaggttcaagtgattcttctgtttcagcctcccaagtagctgggactacaagtgtgtgccaccacactcagctaatttttgtattttttgtagagatggggtttcatcatgttccccaggctagtctgaaactcctgggctcaagtgatcctcctgtctctgtctcccaaagtgctgggattacaggcatgagccatagaaccaagcaactttttttttttttttatttgagactcagtctcaaaaagataaaataaaaaaagaaagaaagatcatacctattatgatacaccagggtttctcaaattttgtttcctattagcatcatctggggagcttggaaaaaaatcccaataaccaggctgggcgcagtggctcatgcctttaatcccagcactttgggaggccaaggcgagcagatcacttgagccgaggtgtttgagaccagcctgggcaacatggggaaaccccatctgtacaaaaatcgcaaaattaagcctggccaacatagtgaaaccccatctttactaaaaatacaaaaactgatctgggcctggtggcacacatctgtagtcccagctactcaggaggctaaggttggaggatcgcttgaacccaggaggcagaagttgcaatgagctgctgagattgcaccactgcactccggcctgggtgacagagcgagaccctgtttcaaaaaaaaaaacaaaaaaccagaattagctggccttgatggtgtgcatctgtagtcccagctgagccaaggaggtgaaggttgcagtgagccgagattgcaccagtgcactccagcctggtgacaggataagaccgtgcctcaaaaaaaaaaaaaaagaaaggaaaagaaggccaggcgcggtgactcacacctgtaatcccagcactttgggaggtggggcgggcggatcacaaggtcaagagatcaagaccatcctagccaacatggtgaaaccccgtctctactaaaaatacaaaaattagctgggcatggtggcaggcacctatagttccagctacttgggaggctgaggcaggagaatcacttgaacctggaaggcagaggttgcagtgagccgagatcgtgtcactgcatgccagcctggtgacagagtgagactctgtctcaaaaaaaaaattaaaaaaaagaaaaatcccaataaccaaaccctggcccagaccaattaaaacaaaatctctatacatggctttcaggcctcagtggttcttattgtgtgtgttgtattgggggggcttttgagacccccactcctaacctattcccagaccaaactgagggttgggcttctatatctcacagcccaataatgagacacagatgaactagggaggaagagagtttttatttctgtaactggttacagggagaaggcctggaaaatatcaccagaccaacccaaaattacaaagtcttccagagctcatataccttctaagctatatgtctacgtgtaggtgtgcattcatctaaagacgtaagtaagttatagtcttttaacccataactaagatctgagtcctgaagaccttcctctggagcctcagtaaatttacttaatctaagtgggtccaggtgctggggtgattacccttatcttatctcctgctaaatcatggaggtttgggggagttccttcaaaccccaataaacttgtttgtggaggcctgaggagtttcttcagaccgccaataaagcttgtttaatcctaaaagggtcctgttaagaattccttcattatcttgtcatgcttcaaggcccaggaaaggcctaggcacaactctgggtgggcttttgttacatcccagcctttgtataagggcactggctctcttatcttttaatatttaacttaacccttgtaatcccagcactttgggaggccgaggtgggtggatcacgtgaggtcaggagtttgagacaagcctggccaacatggtgaaaccacgtctctactaaaaatacaaaaattagctaggtgtggtggcacatgcctgtaatcccagccacttgagaggctgacacacaagagaatcacttgaacccaggaggcagaggttgcagtgagccgagatcatgccattgcactccagcctgggtgacagagtgagactccatctcaaaaaaaaaaaaaaaaaaaaaagcaaacaacaaaaaccctctcttggctgcttgctctgtgccttgagcaagaatccttccagcccaggagtcacttagcagtcttcaaacattctagtttgcttctctagagtttcggtcacatttctttcctaagcaaaacactatataattaccgagttgcaaaaatcatctttccaaacgccaaaacggagataagacagaaaataaaagatgtgagaggcaggcatcctgggtaaatcactctggtattgcagggttgggatccccagggtactatgatggctaactggaacagaatgcaggcatttctccaaagcccaagagttcataaaagcaaattaaatatgactcaatggattaatcaagggccaccagttgcattactgattactaactttgcagaaatgaaacacggtatgttgggtcaaggttcagtgaggctggttttcataacattccaggcaataaacaggcacactcattcattgataaatgttgacaatgacaggtggtgactgttgataaggtttgattgccattcagaaagtttgtttgacctctttccaagtaaccacgaccttacctctctcttttgagcttatcacaattggtgactgtacacttgtttcatagacttccccaccagactgtgagctccatagggctgggccccaggtcggtttcaccaccaggctctctcgcctaactcggcccacgggaggccgtttccagctgctctggctccatagctcagcctggcagcggccactgggtgccctgatttggtcggccccgccccaccgggccttacttccgggatgcttctggcgggagcaagaaacatggttacatacgacgtaatgcgcctgcgcacagtccgtcctgcgcctgcgcattcctgacagcacctcccggaccggacataacggtccccgcgcggctccccgaaccggaagtggaggtgagctgtcgcgggcggcgcccggccttgctcaacgcccagcagtccccaccgtcgctgccgccgccaccgccctcggccgctgccgaggcctcctgcagccatcatgtccgccagcgccgtctacgtgctggacctgaagggcaaggtactgagggctccccaccctccctgttgccaggcaaccggcaggggcctccgcccgcggggacccaccctgttgctaggtaaccggcttatgagccccatcctggtgtgaggcagagaggccggtagacctcacctgagagccccatcctgtttctgggtaaccgggcgggggtcttaagtgggtaatccccgccctgttgctacgtaacgcggtgggctgcagccaccgcgttgccaggtaactgactgcaccgccctctgctccccggcgccggggccgggggctcgggcctcggtggaggacccagaagcggggccgcagccggcctcggagccaggcagggcgtccaggggctgcgcgacccttggccgggggtggcgaggcgtggcggggactgggtgctctcgagccagtcccgccttctcagggcgttacagcttctgtttatcgtgcactttctctcagtaggaatttctccacgttcattgtgatagtgagttacaaggattaggtgaggtgagtggtgatcacgagtgccgttttatagagggagaaactgaggcatggagaggtgaagcaacctgaccaaggtcacaatggtcacagagaagtagcaagtctaggagtccgatccagaatcattcgtttattcagctgatatctggggagcacctactaatgccgggcagggtactaagcctggggtcgatttgtgtttagcaaaaaacagtccctttttttttgttttgtttttgagatagtgtcatgctcagtcgtccagtctggagtgtagtggtgcaatctccactcactgcaacctccgcctcccgggttcaagcaattttcctgcctcagcctcccaagtagctgggattacaggcacctgccactacgccgagctaaattttgtatttttagtagaggcagggtttcaccatgttgaccaggctggtctcgaactcttgacctcgagtgatccacctgtcttagcctcccaaagtgctgggattacaggtgtgagtcatgtgccagggctcaacaatctgtgttcttacggtgttcacaggctggtaggggagatggatacccatctccaaaaacacaaataaatgtcaattgcagtggtgttgaggggcgagtgtgttatacagacagtcagcctcagcccgaggatgagagagggtttccctgaggaggggtgacaaatggaccagagacaccagggagctggacataaactagaacccaggcatcttccccagaggatctgagaaaactttaagaagggattgtccccaccttttagaaatggtcctctgccttctcctaagtccatcccaggtgcaaggcaggtggctgcctggcctgttgcatgtggaagcaacaagaaccggtccaacaatgtgaagcccaacattgatcagtgagagaaacaaacatgggtgtcaggtcctaggtgaggcgggcaggggtgagccctaaagcagctgagagtgaagaggtgaaatggctgccccttcccgccccaccccacccccagcactttcctgaagtcccttgagtgggtgcctgctctggaagccacccaaagtcaacaactggtgagacccagtgctgggcttccctcccccgccttcttggaaggagggaagacacccgtcttagagcacgccaggggctgggtggtgcggtggaatgagtcctggtggaatgagtcttgcttccaccctggccactgcctccccagaggtgccagtgggctgcctgtcttggcttgcttattccttcagcaaacatttcatgagcacctagcatgcaccctgccctatgccgggcatagggtgtccattggcgccatggctgtggtgttaggggtgagctcaaaacccatccctgctgctcagctgtgtgacctgggacaggcaccttctcctgtctgagcctcactttcctcactggtcaaaagaggcttttatggagttattgtgcagatttgctgagcagatgcatgagacaggctcagcaccacccatggtccatgttagctctcccaggcctctcggtctagcaggggagtcacctagaagcagagacattaccacacagttggatccaggcagccacaggggcaggaacaaggtcccaagtcctgcagttgctcaacctcatctttagccagtggaagggggaggtggttatgaaaggctccctgaagagggcgacgctggaagtaggtttggaaggcacgatcatgtggaaaagaggtgttgcaaggggcagcctgctggggctgccaagccagaagtcctggctaatgctgagatgggagagagggaccaaggggaccacttcagttccaaccaggagccaccgtgaggagaccgtagcccagagaggcatgatcagacctgcctttcagaaagctccccaaggcagccgtgggcttccttcccttcctctgcaaccatgatgccctttcttattccacgacccacggacctcctgtttccaaagtcagcctcgtgagccgactgcatttaatcaacaataaagcacactgagaaattcatggccacgtgtctggtcaccgaggacaccagcgtggccacactgggctgggaggaagctgtcctagtaggaagcttctccgctttatctaactggcttctcagcagcttctgacaccactaaccacctcctcttcagtgctcccttccgcttccaggaggctgcgctctggggggtttcctcctgtttcttgcactgcctactttcctccttttctgccctccccagggctgtggagcggctcaggcctacgcgtgcctccccatgctgtcactcttcccaggtgggctttgactcatgtccatgggccagtgactctcaattttgttcacagcatttctctggagatctagtggcctctgagacaccagagaggtcccgccgccaccataaattcagcattcttctaaatgcactccctgtacctgctctctttccatttcagtgatgccatcacccattcagccatctgcacaagagacctggacgttatcctcgcctcctttgtctcctcacccctgttttcactccacaaatgtttactgagcacctactatggtccaggcccctttctgggtgctggaaaacagctgtgaatgagacaggagtagttgctgttctcaggggatgtcagacagtaaaggaggatagaaataaatgtttaatgcaccaggtgatagggataaagcaggggtcagggttcagagggatgggacatgatctcagccagagcaagcagggaggatttcttttttttttttttttttttttttttttgagatggagttacgttctgtcagccaagctggagtgcaatggcacaatctcggctcactgcaacctctgcctcccaggttcaagtgattctcctgcctcagcctcccaagtagctgggactacaggcatgcaccaccacgcctggctaattttgtatttttagtagagacagggtttcaccatattggtcaggctggtctcaaactcctgacttcagatgatccgcctgcctcagcctcccaaagtgctgggattacaggcgtgagccaccgcgcccagctgggaggacttcctagaggaggtgttatttgagctgaggcttgagaaatgagaagagccaggtcagggcaaaggcccgaggtgggaacagatgtggatcactcagagaccagctaaggggccaggctggagcagagtgaaccagggcagcgcaggcagagaggcgtcagaggggctgtgaggagccagaccacgctggtccttgggagccatggggacgggcttgggctttgttctcagtgccggggaggctggggtaagtggcagttcagcagtgggggagagaccccgtctggcttctgtgtaggaagagccctgtcaccctttgtgaggaaggacctggggggtcaagagtgacagcagggggaggggctgttccctcaacacgtcatcacctgcctccctccaatcagttccacaggccacgaagcagacactaggaaaggaaggtgccaccccgcaccacccccagtctcgccttgagagaataaaggcagcgtgtgatgaaatgccaagttctgaggcaggtggttcccaggatggtcagcgccgcaatggccttctcagcatgttgctgagtcctgcagctggctgtcctgcaggccccaagagctgcagctgctccaggcagcatctccaaccgcagccatgcccaggctagcaaaacttccgacctcctttttattctttaatgaggtataatttacattaataacctgcacttatctaaagtgtacaatttgatgagctcagtcatgtgggaagccataaccacacattccatcgcccccgaaagcttcttcacacccctttgctgtctagccccatccctaggcacccaccgatgtgtttttcatcaccattttctaggattttatacacgtgcagtcatgcaggatgagctctcgtttgtctggtttctctcagccagcacagtgattctgatgcgcctgtgtatcgggagtccgatcccttccgttgctgaggcatgcttctcatggtgtgcacggatacagtttgtttctagttcacctgctgaaggacattggcattgtttctagtctgggtctgtttcaattaaagctgctgttaagattctcgtgctagtgtttgtgcagacatgtggtttcatttctcttgggtaaataccagagagaggaatgactggatcgtatggtaactctgggtttcactttttgagaaactgccagactacaccaaagtagttgtcccattttccattcctatcagcagtggacaggggttctggatgctgtatatcctgacccacaggctatgaaagagagagaccaggaagagggcttctcccttcaggccacctgtggacttcagtaaatacgaaccttcagcgggagtgggcgccctgacacaggcgggagagcaaggtgcgttggcccggcaaaggctctgagaaggtctgcattgagagcttgtgaggcattgcttaacctgatgtctctgggtgattcagtcctggacctttgctgcagagttcgcctctaccctcaccctgcgaagaactgcagtggcccctgtgggcattcacactgggagatgctcttctccaggaattccctgggggatggagatcagaacggcctcaagtcctgctcttttgcggatagtggccatgaccggagtccccagagcgaagcagggtggtgcatctcaccccctgccccaagcccccagattgtagaactgaaaatgcaagcatcttttctcttccttccccaccccaggtgctcatctgccggaactaccgtggcgacgtggacatgtcagaggtggagcacttcatgcccatcctgatggagaaggaggaggaggggatgctgtcgcccatcctggcccacgggggggtccgtttcatgtggatcaaacacaacaacctgtatcgtatccctttgctgggggtgctcccaggggactcctgtgtgggtgttggtgtgtgtgcatatccacacgcctgcaagcagggctggtttgtgcacagcgcaagcattggacacagccatgccctcctggagctccctgctgcctgcggagacaggcagacaatgcacgatgacatgtgtgatgggtgtggggagaggagcaggtgtgacttgaacctcttcagcccaggggcccaggaagggaaatgacaccctggaggaagcctgcagggaggcctggcttctgccagctggaggggtgggcaggcactaggcgtgggtgaaggctctgcagggaagagcctcattccaacagctgcactcggggtggctggagagggggcgtgtagggcagcgaggctggagtggtcagcggggtctggggtctcaaagaacatcatctgaaatgtgacaggaagtctctggaggcttttagatgtgtgtcttctggaggtttctggctgctgagtggggcaagactgtggggacaggagaggacatgggtaggtggggagtaggctggggccatcgtgcaggtgggaggggaagtggcctggaccacggaggggtggtggggtacagccccgcccagatctcagagccccccacccttcctgtccttgggcccatggggagacttggccaagccagtttctatccaggaggtctaactggccaccccacagctttgggcagacccgcaagcccatctcagtacccacactactgcggaagggcctgctttgccactcacagcccgtttgagccccagctccagcagccatgggggatccctcaccttcccacagttcagtgggaacaacgacccctcactgcaggaccattcgggtcagttgaactgacttgtgcatattgctcccagcaggcatgggctctgtgccctttcctgtgttcttggagacacttggggccttgccagtacagtgtggccaacgggccagaatatccgctgggagccctttggaaatgcagaatcccaggctccacccagccctgccccgtcagaatctgcattgtaggaagatttgttcctggtggccggtgtgcacattcccatgtgggccgtgctggcccagggctccctgtggtgtgcctctgtgtagatttcacctggctctggaaggccctgagaatagctctgaagatgatcttaggtggctttttttttttttttgagacagagtctcgctctgtcgcccaggctggagtgcagtggcgccatctgggctcactgcaagctccgcctcccgggttcgcgctattctcctgcctcagcctcccgagtagctgggactacaggcgcccgccaccacgcccagctaatttttttgtatttttttagtagagacagggtttcaccatgttagccaggatggtctcgatctcctgacctcgtgatccgcccgcctcagcctcccaaaatgctgggattacagtcgtgagccaccgtgcccggcctaggtggcttttaacccagggaactgacagtcctctgaagccgcccaggtattgggagagggagaggtggctgtggtctgagctcagcaggagccatcagatcagtttctggttgggcccccacatttcacacctgggcatctagggaagagacagggagggctcacccctctggcttagtggacatcgtttcacccccagccgggacagtgctcagcaaggccgtggctgagaggcacccatgagaaggtgagaggcccccactgcccctgcttataaagcatctggggagggcacattgccaggcagcaggagggaggccagcactcgtttgactgggccagcgtccctttcctgggcccctgtgctgtgctggggtgaggcgggaagggagaggatacagcccccaccctccctcctagagctcactcctgggcagacgagccaggcagcacagatgtgccatgaacagggatgtccagggtgcagtgcatgggcctacagaggaagaaccagccttctctggcggcccggggacccattagggaaaaaggaataggaagcgcccagcacacactgaccctgggaggcaggggctggctcctgtggcagaagggaacatctgtgccagacatctcacctacattgccttggtgagttcattcacaggcctccattacacaggagagaaatatcaaggtttctctagaaaggtttatttcatgggccaaggcttgtgtttccaaagccaggaagggctgaagccagaattggccctggctgcttgccacagagtctggccgggggaccctggacctcagcagggtcatgatgaggtcagctttggaggagcagggccagtgtgtcctgctttctgctcctggaatgagcctcactccctccctgctcaaggcagcccttcacccagccgccgggacaggtgccctgtgccacctgccatccctgtgattctccatctcagtgagtgctccctggggcctgggagcgcatctggctggtgactcctgtgtcccaggtctagcttggaccaggagctttgtagcccaccatgggccaagtaaacggctgggagtggggatagggaaggctctgagggttgtgagggttagggggtccctccatgaaccaggatcttccaggcagcagccccagcctctgaatgctccttaactgtggccgccatgcagtggttgccacatccaagaagaacgcgtgcgtgtcgctggtcttttctttcctctataaggtggtgcaggtgagtctcgctcggaggggccgtgggcttgggtggaggttgtcttggctctgcttgtggacctccccatacctggccaccctacagagagctgtggcatccccagggagcactggggctggaagcccaggaagtgggaaaggggagtcccaactccccacgcctgtggaattctatagctcacgttgctcccctaccgtggggaagaaaggaaagtgaacaggaaaaggtagggctcagagcaggggtgccctgaccctggaagggacaagcaggggtcagcgagctttggaaggatgtggggtgaccagctggatggggctggaataaccagcagagctgcagagctgagcccacctcagaatctcccagggggctctcaaggcacagatgcctgacgcccaccttggagagagctgacacgccaggcccaggctgccagtgagacacagatagcagccagggtgaaggcgccaggacaggtgtatgtgtggtgcagctagggaggccagcgtgcgtgtggcagagtatgaggctgaggtcagctgggaagagggcggattatacaggagtgtggatttcattccacttctgatgaaaggtagtggagggctttaagcaggagactgacaagacgtggtttgatctaaagcagcctctctggctgctgagcagaaggaggacttgaggccagtgaggaggctgctgctggcttcccggagaggatgggcctggccgaggtgggctgtggggctcacgaaagtggggaacaggacccaggaggcctgtgctgggcctgggaaagctttcatccctcactgatgctgcctgtgcagaatgttggggaacaggggcaagcctgggcggtgagggcttggggaaggagccgagggtcacctgggaaggccccacgtgcaggccaagggctgccttcactggaccggtgatgctgtcacaggcagggctgggcctggctgtgctgcctgtggtttccaagcagaggccgggtgatcacagtcctgaagcgcgcaggggtcagcagatcagagaatgggggatgcgggaaggggaaggtcctcacccaagggttgggctgtgcctttctgttttagtgacgctccttccttcagcatttgtgcctgcaaaagtgcttctaacagcccctcttctttggcgtcccttccttaaccttctgagctttccattgaaatggggaagatgcatcaagctttccactgaaatggggaagatggcagctcatcaggtccttgcctgagtcactccagactcagaaagggatgacagttacagtcgctcaggaggggctgcctgtctgcgggtgtctgggcagggaagagaatgggaacgcagagcttctgaaggcctcgggacatctgcagtggctccagcctggccccaccccacagccagccactgctgtcctgccccataacctgggtccagggccctgtagcacaccaccgagcctgggaagtaggctgttggtaggacttagcgggcaaatgaatgtgtgcaagcgttcattcattcctcatccgtccgctcaatgatctgcctcccattcctccctccctccccaaccgccacaggtgttttccgagtacttcaaggagctggaggaggagagcatccgggacaactttgttatcatctacgagctgctggacgagctcatggacttcggctacccccagaccaccgacagcaagatcctgcaggagtgagtgggcaggggtggggcctggggccaggcctgggcggtgtcatgacatcgacgtcatcaggtgtggaaacagaaggggcaaatttgtgttcatgttgtcccccacctgcctcccacctccagcagtattcgggtttttactaagttgctcttagtggttttaattcgtttcctcctctacgcccccacataaccgtgcttttcctgctcctcatctttactctccatccacacagatgccttcagtaccttgctactaaggagtcacctcccttgtttttactgtcataaaatgagactgtgatcgaaatctcccctctttggaatcctgcccttcagataagaagcaatgtgaattaagtgcttcctgggggccgggccccagcacttcacattcactcgattcacagcctccccgtataccgtctccccattttacaggggacaagcaagcagactcccagagaagcctgtgttcctaaccgctgcacctcctgctccttcagcaggatggggtcaccaggttacactccgaggcgtcagttccatccacgtgctcagcagggacgggaagcagctcacacccacttcttgttttccttcccaacatggtcttcttggtcccccaaaatgagcacttcagcctctataacttgagtgtattggcttttggaaattgtgaagatttttctgtatgaagcagccccaggtgaaccagaggctgccttttctggagctgctgaaatccaagggctattttcaagtcggtcagaacctgccctgtaccccccacccaaccctgccgaaatgtcaaggccagaagctgtggcgttggtgcgggtaccacctccttcactctgagcgtgtggccccacaggtacatcactcaggaaggccacaagctggaaacaggggccccgcggccaccagccaccgtcaccaacgcggtgtcctggcggtccgaaggcatcaagtatcggaagaatgaggtgttcttggacgtcatcgagtctgtcaacctcttggtaggcctcttttctttccttcttctgtagggttttatctcttccacgatagaaataaacacagcattttaaaactggcaaagccccgagagccgttctgtgtggtaacagatagcaggattcagtttgggccactcattgaaatgtgagtttgtcttatcttttttttttgagacggaatctcattctgtcgcccaggctagagtgtggtgacacgatctcggctcactgcaacctccgcctcccaggttcaggcgattctcctgcctcagcctcccgtgtagccgggattataggcacccgccaccacgctcggctaaagcttgttttctttattagcatttatgctgactgagaatccatacatgcacattatttttaaaaattagaagcagggtatgaggttagaaagtgaagggctcttatcagtcaccatgcacagaaaaaaaaaaaagaaactaaagggctcctataatcagaaagattaggatttattcaccgtcaccctctcgggcctcattctgtagacagacagaaacaagtatattgatttttctataaacctgagatcataagatgtggttctcctgcagcttgtttttttggtggtggttgttgtttgggttttgattttgcgttcagtgttactgttttgtatatttttttcttttggttttttaattatgaggaaagttgacgttttgaaaatgaattttagcgcttgtacagatttgtgtacccatcaccacacccaggacacagaacctcaaaacctcctcatgttgcccctttgtagctccatgctcccctcttccccatttcctggccaccattgaactgttctccatcactggagtcttcatcgtgttgtgattgtcacacgagtggcatcatatgtcaccgcagctgtctttctgagattgtcgtatgaatggcgtcatacagtcatgagctctcgagtctggctgctttaactcattctaattctttgcgattcatccaaatccaattgttttgcatatcaaaagtctgttcccttttatatttatttatatttattttctgttctgaaccacagaaggacatttgggtggttttccaatctttggcaattgtcaatagagttgctagaaacatgtcgtgtccaggtttatgtgtggacataagttttcatctctctagggtaaatacccaggagtgggatggctgggtcacacggtaagtgtatgtttacctttataagaaactgccaaaccattgctgttttgcattctcgccagcaacagatgagggttgtgatgaccccacatcctttgtcagtagttttatttttgtcatcctaataggtatgtagtagtatgtcagcacagttttgtgttttgtttttgtttttgtttttgagacacagtctcgctcttgtcgcccaggctggagtgcaatggcactatctccattcactgcaacctctgcctcccaggcttaagcgattctcctgcctcagcctcccgagtagctgggattacaggcacccaccaccaggcctggctcatttttgtatttttactagagacggggtttcaccatgttggccaggctggtctcgaactcctgacctcagatgatccacccgcctctgcctcccaaagtgctgggattacaggtgtgagctaccacgcctggcctattccattttcttaatggctaataatgttgagcattgctttacatgtttctttgtcatctgtatatcctctttggagaaatgtctctgtgcatctttttagcatttttaaattgggttattttcatatagttgagccttgatagttctttgtgtgttccagatagaagtcctctgtcagataggtgatttgcaagtattttcccccagtctgtagcttatctttttattctcttagcagtgttttttttttttcgacagagtctcactttgtagcccaggctgtagtacaagtggcatgcttggctcagtgcaacctccacctccgggcttcaagtgcttctccagcctcagcctcccaagtagctgggattacagacgcatgccaccatgcccggctaatttttgtatttttagtcgagacagggtttcactatgttggtcagggtggtatcgaactcctgacctcaggtgatctgccttcctcggcctccctaagtgttgggattacaggcgtcggccaccatgcccagcccccaatactatattgaataggagtggtgagagagggcatctttgtcttgtgccagttttcagggggaacgctttcagcttttgcccattcagtatgatgttggctatggatttgtcatagatggctcttattattttaggtatgttccttcaaaacctagttagttggctgggcatggtagctcccgctctactaaaaataggaaaattagccgggcgtggtgatgcgcgcctgtaatcccagctactcgggtggctgaggtgggaggatcacttgagccccagaggtagaggttgcagtgagtccagattgtgccaccgcactccagcctgggcgacagagcaagaccctgtttcaaaaaaaaacaaaaaacaaaaccaaaaaactccagtttgttgagagtttttaacatgaagagatgttgaattttatcaaaagccttttctgcacctattgagatgatcatgtagtttctgtctttagttctatttatgtgatgaatcatgtttattgatttgcatgtattgaaccaaccttgcatcccagggataaaagccttcttgattgtggcggattagctttttgatgtactgctggattcagtttactagtattttgttgaggatttttgcatcaatgttcatcaaggatattggcctgaagttttctttttttgttgtatctctgccaggttttggtatcaggatgatgctggcctcatagaatgagtaggggaggagtccctcctcctccgtttttttggaatcatttcagtaggaatggtaccagctcttctttgtacgtctgatagaattcagctgtgagtccgtctggtccaggttttttttggttgttaggctatttattactgatgcaattttggagctcattattggtctgttcagggattcagtttctccctggttccatcttggaagggtatatgtgtccgggagattatccatttcttctagattttctagttagtgtgcatagaagtgttaataatagtctctaagggttatttgtagttctgtggggtcaatggtaatatcccctttgtcatttctaattgtgtttatttgggttttctctcttttcttaatagtctagctagcagcctatctatcttattcattcttttaaaacaccagctcctggcttacttgatgttttgaatggtgtttttgtgtctcagtcttctagagttcagctgtgactttggttatttcttgtcttctgctagctttggagttggaggcttttgcttcgtgagttcttttagttgtgatgttaggttgttaatttgagatctttctaactttttgatgtgggcatgtagtgctgtaaatttctcttaacactgccctagccgtgtcccagagattctggtctgttgtatctttgttcttatttgtttcaaataatttcttgacttctgccttaatttcattatttacccaaaagtaatttgggagcaggttgtttaatttccatgtaattgtatgggtttgagtgattttcttagttttgaattctatttttattgatttgtggtctgagagagtggctggtatgcttttggttcttttgcatctgctgaggattattttatgtccaattgtgtggtggtttttagagtatgtaccatgtacagatgagatatattctctcgtttttgggtggagagttctgtagatatctatcaggtccagttgatccagtgctgagttaaggtcctggatatctttgataattttctgccccagtgatctgtctaatactgtcagtggggtgttgaaatctcccactgttattgtgtgggagtctaagtctctttgtaggtctctaagaacttgctttatgaatctgagtgctgctgttggctgcatatttatttaggttagttagatcttgttgaattgaataccttaccattatgcaatgcacttctttgtctttttttgatctttgttggcttaaagtctgttttgtctgaaattaagattgcaactctgcttttgtctgttttctatttgcttggtagatttttctccatttcttcattttgagtctgtgggtgttattgcatctgagatgggtcttttttttttcttttgagacagagtcttgctgtgttgcccaggctggagtgcagtggcgcaatctcggctcactgcaacctctgtcccccaggttcaagcaattctcctgcctcagcctcccaaatagttgggattacaggcacgcgccaccacgcctggcggttttctatttttagtagagacgaggtttcaccatgttggccaggctggtctcgaactcctgacctcaagtgatccactcgcctcggcctcccaaagtgctgggatattacaggcatgagccactgcacccagccaagaatggtgtcttaaagggagcatatcatttggtcttatttctttatccagctcttgccactctatgccttttaattggggcatttagcccatttacattcaaggttagtattgatatgcatgtatttgatcctgtcattgtgttgttagctgtttattatgctgacttgtttgtgtggttgctttatagtgttacttgtctgtgtacttaaatgtgtttttgtagtggctagtaatggccttttctttcctttttcttttttttttttttgagacaaagtctcactgggtagcccaggctggagtgccatggcgtgatcttggctcactgcaacctctgcctcccaggttcaagtgattctcctgcctcagcctcccgagtagctgggactacaggcgtatgccaccatgcccagctaatttttttttggtatttttagtagagacagagtttcaccatgttagccaggatggtctcgatctcctgacctgacctcgtgatccacctgccttggcctcccaaagtgctgggattacaggcgtgagccactgcacccggcctttttttttttttgagatggagtcttgccctgtcacccaggctggagtgcaatggcatgatctctgctcactgcaacctctgcctccctggctcaagcaattctcctgccttagcctcccgagtagctgggattacaggtacccaccaccatgaccggctaatttttgtatttttagtagatatggagttacaccatgttggccagactggtgtcgaactccacacctcaggtgattcgcctgcctcagcctcccaaagtgctgggattacaggcatgagccaccacacccggccttcttttcatatttagtacttctttcaggagctcttgtacagcaggtctgctggtaaacaaattccctcagcatttgcttgtctgaaaggatcttttttattcttctttttttttgagacagggtctcattctgttgctcaggctggagtgcagtggcatgatcatggctcactgcaacctctacctccctggcacaagctattctctggcctcagcctaccaattggctgggactataggcaggtaccaccacacccggctaatgtatatgtttttggtagagatggggttttgccatgtttcccaggctagtctcagactcctggattcaggcactccacccacctcggcctcctaaagtgctgggattacaggttgagccaccacacccaagttgaaaacgatctcatttctcctttgctgatgaagcttaggttggccagatgtgaaattctggattggaatttctttaaaaatgtttaatatattggccaggagtggtggcttacacctgtaatcccagcactttgggaggctaaggcgggggcgggggggggggagaggggggaggggggaggggaggggatcacctgaggtcaggaattcaagaccagcctggccaacatggtgaaacctggtctctactgaaaatataaaaattagcagcacgtggtggtgcatgcctgtagtcccagctgcttgggaggctgaggcaggagaattgcttgaacctgggaggcggaggttgcagtgacctgctgagatcccaccactgcactccagcctgggccacagaatgagattccatctcaaaaaaaaaaaaaaaaaaaaaaaaaaaaagaatgtttaatataggcctccaatctcttctggcttgtagggtttctgctgagaggcccactgctagtctgatgggcttccctttgtaggtgacctgctatgtctctctagcttctttcattttgaccctggacaatctgatgattatgtgttttggggatgatcttgtgaagtattttgcaggggttctctgcattccctgattttgaatattggcctctctagctagactggggaagttctcatggatagtatcctgaaatacgttttccaagttgcttccattttccccatctctttcagggacaccaatgagttgtagatttgctctcttttttaatcccatatttcttggaggctttgttcattccttttcgttattttttctctattctcatctgactgtcttatttcagaaagccagtcttcaagctctgagattctttcctcagcttggtctgtactactgttaatacttgtgattacattattaaattcttatactgtgtttttcagctgtatcaggtcagttacatcattttctatcctggctgttttgtctgccagctcatatattgttttattataattcttagcctccttagattgggtttcaatgttcctaatctcaatgatctttgttcctatccatattctgaagtctatttctgtcatttcagccatctcagcctagttaagaactcttgctttgggaggccaaggtgggcggatcacaaggtcaggagattgagaccatcctggtgaacacagtgaaaccccatctctactaaaaatacaaaaaattagccgggtgtggtggcgggcgcctgtagtcccagctacttgggaggctgaggcaggagaatggcgtgaacccaggaggcggagcttgcagtgagccgagattgcaccactgccctccagcctgggcgacagagcgaaactccgtctcaaaaaaaaaaaaaagaactcttgctggagaactactgcagtttggaggaaagaggacactctggttatttgagttgtcaagagtccttgtgctcgttctttctcatttttgtgggctgatattcctttagtctttgaagttgctgtcctttgaatgggtttctttttcctttatcctatttgatgaccctgggggtttgattgtgtataaggtgggttcagttggatggcttcattattggaagattttaggggaccaaggctcagcttaggactcctgaactgcatgctctaactctggaggactggtatccagccctggctttgatctctggctccttcaggttaagaacctgctctgctagaggggccaagctgctcccagacagctggtcacaacactccaatgggtggtgccaggcaaagcacttcatagggtagtggcagcaggatctgttcttgtttgcatgtgccagcggcagcacagcggggtgcacgcttatcggctgtgacagagtgctagtggatgtcagggagccagcctctgggagggcatttgtagcagcagcagtagtggcagtatggctggggtgggggcaggggccacgctggcaactgtgcacctgttcattggtgccgatgatggggttagcatgggggcactggtgggtgcaggactgtgtgtgccctttgtgcatgttcacactggcagcagtggctgctcagggctaggggtaggtcctctgttttctctgcctagtttcctgtgggaggcccagcataggtggggaactgggaggggtggggctggcgggctctatgctgccaacactctgacaacaacggtggtgggagaggagaatgaggggctggggtgcacttatgctggcaacagtggcacagcagggtgcacacacaggcatgctgttggggaagggtgggctaggtccacccacgcacacaccaccagcaaaacaatattgagggtgcctgtgggcaagaacctgcaggcaaaactgcacaggggaggctgcagtgggagcggggctcaggtgggctagtgtgtccatggggccgctgtgcaggagtattccccgttcaggtacagtctgccagtgcaggagctctgatgccgcccccaagaggtacctggggattgcactgcaagcaggcttggccaggctggggccccaggagaggccagcagactgagggttgctcaggtcagaccagccccatctgatgggcaagactaccctggagagttcaggtctgacagttcccctacggctaaagtctcctatgagagcaagtcaagcctaggggatgggtgtcctggctgtgctccaccacatatgcttctgcatcaaaccccctggcctggcttaggctggagttctgccccgcctgaggtaggaggcagaactcgacttaggaggtgaggcttggacaccagaccaaattgaggctagctaaaagaggtcagggcagaagcgcctccccataagacccaccccacagtgtgctatgtcagtttgccattgccgtggcaacacttggaagttactaccctttttcatggcaatgacccaacaacctagaagctaccacccacattctagaaatttctttataaactgccccttaatttgcatataattaaaagtcagtataaatgtgactgcagagctgcctctgagctgccgctctgggcgcactgcccatggggtagccccgctccatagggagcagtgcctctgctgccgtgcacatggctgctttagtaaaagttctgtttatcaccaccagctcgcccttgagttctttcctggctgaaaccaagaaccctcccgggctgtctcagttttggggctcgcctgccctgcatcactaccacttctttaagcagcttcccctgccaacgcagctggccgtggcagtcgaggggtccttcctgccgggattccagaggccatggcaagagtgggttgccccttgctagttcaattcaccccctccacaggagtcactgggagccaggaatgattcctggtgcacagtagccctgtgcagggttcccagcctcctcctctgccttccatccagcctctatgtcttccctccgttcactctcagggccttcccactgaagatctaggagtctaggagtgcacctgtctgcacagtgtccctgtctcttagtgggagatgtttctcctggctgcgtctagttggccatcttggagcaggagcaaaatctaggcagtctttaaacagcttcaaattagggttctcacaaacccctctttgggtaagcaaggtatagagggaagggacccagagcttccttgccctctctggacacaccaccctccaggaacctccacgtgttcagctctctggaagcttcttttatctcttttgctttacgtcttccctcactgagacttccagcacagtgttgaatatgagtggtgagagctgacattcttgctttgttcctgatcttagagggagaccattaagtcttttgccaccaactaggatgttagctgtaggtttattataggtgttctttttcaccttgaggaagttcccttttattgctagtttgctaacagtttttttttttttttaatcatgcgtgggtgttgtattttcttcagttctttttctgcatcaattgatgtaatcacatgagttttcttcttttggttgttaatatggtgtattccactgactgctttctgattattgaaccagtgttgcattcctggaataaaatcccattggtcatagtgtattataggttgagtatcccttatacaaatgcttgggagcagaagtgttttggatttcagatttctttggattttggaatatttgcatatgcatcatgagatatcttagggctgggacccaggtccaaacgtgaaattcatttttgtttttttgttttttttttttttttgagatggaatttcgctcttgttgcccaggctggagtgcaatggcacaatctcagctcactgcaacctctccctcctgggttcaagcgattctcctgcctcagtctcccaagtagctgggattacaggcacctgccaccatgcccggctaatttttgtatttttagtagaaacggggtttcaccatgttggccaggctggtctcgaactcctgacctcaggtgatccacctgcctcagccttccaaagtgctgggggaattcaggtgtgagccactgcacctggcttcatttatgttttatatacaccttatgcacgtagtctgaaggtaattttacttttcccttggagatgctgaataaactgcattgtgcacctgcattttgactgcaacctgtcacatgaagttgggtatggaatcttctacttttgacatcatgtcagggctcaaaaagttttggattttggagcattttggatttgggatttttgaattaggaatgcttaacctgtattctttttatgtattgctggatttcctttgctggtattttgttggagatttttggatctacactcataagagatactggtttgtaattttctcttttttgtaatgtttttgtctggttttggtatcaaggtaatggaggaagtgttttttcctcttccgttttctggaagacattttatagaatccatgttaattctttaaacatttgttagaattcaccactgaaactatccgagcctggagatttattttacaaaatgcttttaactattaatttcaaaaaaaagtgttttcttgagtcagggcttcgatctgttgcccaggctggagggcagtagcgtgaacacagctcactacactttgactccagtgatcatcttgctcaagtgatcatcccgcctcagcctcccaagtagctgggactgcagccgtgtgccaccatgcccggcttttggggtttttttgttttttgtgttttttttgagacagagtcttgctctgtcacccaggctggagtgcagtggcgcgattacagctcaccgcaacctctgcctcccaggttcaagcgattctccagcctcagcctcccatgtagttgagattacaggcatgtaccaccacacctgggtaatttttgtatttttggtagagacaggatttcaccttgttggctgggctggtcacaaattcctgacctcaagtgatctgctcaccccggcctcccaaaatgctgggattacaggcatgagccactgcgcccagccctaaaaaggtttttttaaaagccattcttgtagaggaggtctactggctacacattcccttggctttcctttaagaatgtctctatattttacctttatccctaaaggctattttcactggatatggacttctgaattgacggtttttgtttagcactttaatatgttataccacttccttctggcatccatcatttctggtgagaaatccacagtcccccaaatctttattcccctataggtgatgtattattgtcctctggctgctttccagatttttctttgcctttagtttcagcagttagatgaggtgtgcacatctttgtgtttctactgtttgggatttgttcagcttcttggatctgtaagtttatgtctttcatcaaattgggaagttatcaatcattgtttcctaaaatatggttttttgtttttttgttttgttttgttttttgagacagagtttcattcttgttgcccagtctggagtgcaatggcacaatcttggctcactgcaacctctgcctcccaggttcaagctgttataagtaaaatgtttattcagaaacagaatgcttgttcctcggtaccacaaggaaaaatcagcattcaaacaaaaagttttctcagcaaggcaaatttactttctgcagaaagggtgctcctcgcagatggaacaatggcgagagcacacccgaacaaaggaggaaagccgtttttatcccttatgcagcttgtccctgctgctgtgtcctatctccattggctggagccagacctcacaatctaagctaaacctgactggctaataacttaaaactttcctaaatagataaaggcaagggagaacaaaggaaaaagaggaagttgactcattcccttatatctaacatcccttacatctaaaaacaaatatcttggttaaagtacaaggacacagaatgtactcattcccttatatctaacatcctttatgtctaaaacaaatatttcggttaaagtacaaggacatagaatgtacattatttctaacacttatgatttattctttagtgagaagggaaactttgaagaggaacttttttactttctacaaagcaattctcctgtctcagcctcccgagtagctgggattacaggcattcaccaccacacttggctaattttgtatttttagtagagacagggtttctccatgtcgatcaggctggtctcaagctcccaacctcaggtgatccacctgcctcagcctcccaaagtgctgggattacaggcatgagccaccgcacccagccctcagatatgtttttgtcattttactcttccttcaggactccagtgacatgaaagacctttggttattatatcatgtgtccctgaggctgcttattttattctatcttttcttctctctgttagattggataatttacattgaactgcctttaagttcacaggtcctttggccctttcctgtttatctccattctgttattattattattactattattattattattttttttttttttgagataggttcccactctgtcatccaggctggagagccatggagcaagcatggctcactgtagccccaacctcctgggctcaagcgatccttctgcttcagcctcctgagtagctgggactacaggtgtgcaccaccaagcctggctaatttttaaaaaaaaatttttgtagagatgagggtctctctgtgttgccctggctgatctagaactcctggggcaagtgatcttcccacctcagcctcccaaagtgctgggattacaggcatgagccactgtacctggcctccattctgctattaagtccattgagcaagttgtttatttcagttactatatttttaaaaattttccatttgattcttctctttttgtttgtttttgtttttgtttttgttttgagacagggtcttactctgttgcccaggctggagtatagtggtgcagttatagctcactgcagcctcaacctcgtgtgttcaagtgatcttcccatctgagtgtgctgagtagctgagaccacaggcacgcaccaccatgcctggctaatttttttttattttttattttgtagagaccaggacttgctgtgttgcccaggctagtctcgaactcctggttgattcttctttatcatctgtttctttgctgagactttctattttaacatttgttgcaagcatttgcaattttaaaaatagctgtttaaagtcttcatcagataatcccaacatctgtgaagtgttgacagtggttgattgggttttccaggcaagttgacattttcgtggttgtttgtatgctgagtaattttggattgcatcctggactttttgagcattatgtggtgatactctaggtcttatttaagctatatgggaaatattgatatttttgttttagccaacagccaatcttactttcaggccacaagttccaatccccaacctgtaggccatgagcatcacgtcagtttttaaagcccccgtgccatttcctggtcagatctcctgggcgtgcactgcccagtggtcattctgggacccgagtggttagttcagttctcaaactctttcgtaagtcaaactatggtatatgcacaggattcacagatgctcgattctagagagttctggagacataaaccacttcatggggtgactttcctgagcttctggctctgtgctgtctacctggtacttttctgattccttgcggtttactgttgtacacgtctgccattgggcccacttcccagcccacatggagagaggacagagagagaaaaggacaacggttgccccaccccctcggaacagtagctggcaccacagggcctggggcatgaggaacaggggagatggggggcttctgtgttttccaggagagtcaggagttcctcttctggccccagagccaggcctggaggctctgctgagctctcgtgtgctctgtggtgcacacttctgcttccagattgctgctgcactttctcgtggggggcggtgggaacactctgcattcgtggctcttccctggtccacctgctgctgtcttcagtcttccggcagctgccaagcctcctgcccaggtttcagagctgtagtcagtggcaggggaaggggcgccagccgacctgcctcaccagccgcttgctttcttttgtgttcacgctggcctcatccctgcggtgtgggtggactgtatgggctcagccaatccagtcatgcaggtcactcaggtcccgtttctgacggccactggcagtgcagcattgagcacgcttgctcagccccagacgtgtgcacttgggtgtctccgtgacctgggccaggatttctggaggactgaggctgcagacatggaattgccaaggagagtgctgcccagaaagactgtctcgcgcactccgtgcagacctcttcgctttcttactttccgggacgggacagtggcctcgctaaccacattcccctctcccctggggactcttgtctgattgtttattgagccgaaaacagggtccatctgggtgctgtggggtgcaaaggcaagtcccagggggcagcttagagagagtcgagcaggaaagcgctagggctgcgggggtccccgccacagtgcgctgctgcatgtggctccgcccggaaggatcccactcctccaaacaggtcagcacaagggcagctgtcaggatgccaccttcctaagtggcttgcagagctggtggctgggtcaacatttgcctccagatgcgatcatctgagtgcagcctggtacttacacagccgggccctgagcaagcatcccttcagcacccgccctgggaagggcaccggctctgcgtggctggtcacacctcagctgagaaggttctgattgctgcccgcagggccgagatcagcctcgtgggctgggcagcttttcagctccactccctgggcctgctctcgcggcattcacgacctcatgtgttcagttacagctggctgccagggccagtcccaactccctgagggggaggcagcacccaaggggaattaggggccgtcacagtggagtggagggccctccgagaaagaggcaggcaaaatcccaatgctcgggctcctggagccccggccagtgagggtcccgagctcctgagcctccgcttgcccactgagcacctcctgccacacacgctgtttctggtgctggacacggcagcgcgcagccccacgtggcttcccccagcagggagagagagagagagacaagcaggcagacgcagggaagctgttgtgcaccatgggatcagggagccgcttgcgagatgaggacaggacagcacgaggaggtgaggctggggaaggtgacagaaccggagcccttggggccatgtccggttccctgcccctcccagggctgtcatttgcttggcacctcagttttcccaattccctcagaggcggcaagctggtgaggggcttttgtttgtctacccagtgctttttggacatcatgcataagactgcacagactctcctgccactctgcagacaggaaatgcaggccctgcacatgttagcctggctggagccagcatctgggcccaggtatccaagtcggtggcctttggcccacttgctggtgtgagcatggcctcgtgcagcatagcagtgtgcagtggtggccagggctgcagccccagcgattcttctgccagtcactctgtgccctcagcacggggcctctgatctgtgcctgtttcctcacctctaaaatggatgcaagaagagatgctccagcatcttggctcacgcaggacaggctagggggtgcaggaccgtcgccccggtgtggattttcagttgcactttcagatgcatctcggcatgcgcagtgggttacagcccctcaggtcatctccccacagtccctgccccagaggttgtcgaggcgtgtgtggagcaatgcctggcgcagtggaaatgctgtcagtgttagccactgtgactggatttaagttgattattttggatcaagtgttatcacacttcagggtggccctgagaagcaagaaggggtcaggactcaggaagcaccatctctcataagccctggggggtgaggggccagtggcctccctgggaggccaagaggagaaacagctttcaagaaaagcaagtctggcctggttcaagagaccccagcccagcccagcccatcggctgagcagggaccacagggtcctggcccaggtccagccgagctcatggactctcaaagctgactcagcgtggggaccagctgccgggccggcccggagcattcagggggctcctgggagggagggactggtacctgatagagaaccctcagagggggctccaggcacgcatcatcaggtcccagtgtggcctgaggcctagagggcaggacccacagtgtccacctcatgtccacagggcctcggcatgaaggctggaggggtgagcctggggaccctcagccaggcgtgggttggtgtgggttaggggtagaccttagccacagctgggactctcccagctcaggggatgcccaggagagggatgggcttggaggtgagaagggcgttgagagtggggtggccagagggtcacatgatgtggtaggaggcagtggctggtgagttggggacctcccctcacgcccacaccgccacccccaggtcagcgccaacggcaatgtcctgcgcagcgagatcgtgggctccatcaagatgcgagtcttcctctcgggcatgcccgagctgcgcctgggcctcaacgacaaggtcctctttgacaacacgggccgtgagtacccttgccaagggccctgcccatgaggatggcctcaccaggcacacacattacagcctagggcagggttgggccaggcggaggaacgagctggtttcaagcacttggttgagcagcacttcacactgcttgagacagctgtgtagagtattcatccttccctggacatagaaggtgcaggggagtgaagatcctccagtccagctgggaggcccccgtcacccggcctcacacgccaggtcctgcaccctgccctgctctgcctggggcactggggcctaggctaaggccttgctctctccctcccaggccaggtttctcccctcaccttgggccctaggtgtgggccgtgtgaaggccacgcatggtgattctcgctcccgccgcctggcctctaacacttcccacagcagggcgggggcagaggggcccagggcctggttttgtgaactgtgcctcccactcagctgtcacaggccactggaagagggtgcagtggctgggcatgcccccgttcctagcccggtgagggcttctcgggcatcagtctatcagggcagctccccgcctggggctgggcagggccccacccacatagccctcagtgaggtggcaaaccaaggtaggacccaggaccccgtggatgccagggcctgagcccttggggagccccgagccatcccccagccaagtccactgatcaatcattcagtgaacgtgtcctgagcaggtcccctggctgggccctgggatggccgctggggactcagcatgaaccagacccaccagccctgcccctggggaccccaggggtgtgaggagtgatggggcagttgtcttgggacccagcccccttggtgtttgtggcccaggctgctctcagtgcgtggactgggggccctgctctgccggggtgggttgcaggtggtaggagtactgctgagatagtgacccggagggcccagatctgtcctaccctcacccctgaccccaggcggcaaaagcaaatccgtggagctggaggatgtgaagttccaccagtgtgtgcggctatcacgcttcgagaatgaccgcaccatctccttcatcccacccgacggcgagttcgagctcatgtcctaccgtctcaacacccacgtgagtgcgccaccctggggctgggctgtcggcagactcctcctccccttcacctccaggaggtgaagcccaggcaggcgccagggccagccccaccccacgctccatgagctgcctggctctgcagagatggagtctgaggacttgggactccgagctttctgaggggcacagacccctttggccaccaccacccctttcccaggcagcccccagagcaggccctggtcatgttttctgcatttgccccaaggcctccccggtagctcccggctacctcggcctgtctgccctggccctccctgacgctggctgtacgctccctgcagggctctgggcccacacctgggcagatggtcccttgccctgggccttggtttcccctctgaaatgggcctttgtcaaacaaggccaggtgtgagcaccctctttgccctccttggcaggtcaagcctttgatatggatcgagtcggtgatcgagaagcactcccacagccgcatcgagtacatgatcaaggtgcgtgggccgaggccacccactgagggccttctggtgtctctggcccgtcccaggagcctaaccgagggctgggggtgccgtagggctgccatccgtgcaccctcactgtggcctcagatgcaggagtgacctgacactgaggggacaccgcctggggcctgctcctagatggtgccacttgtggggaggggcctgtagccaggcatccaggacactcccagaggtgttgcccccaggtggagcacctctgcccctcagcgaccctgtccagcgcagcctggccctgggacatagacattgtcctaggagggcagggcagagggagggatgaggagccttggaagctgagcagacaggaggatgaagatgaaactcctgaaattaggtcttgggagagtctcgagggcaggagaaggggtgggtagtgcctggagaagtggggccaggggcggggctagggaggatcccccgggccaggctgaggggcatgtgtcctggagaggctggccagctcaccttggcctccataaccccgggccgcattggcctggcctgcaggccaaaagccagttcaagcggcggtcaacagccaacaacgtggagatccacattcccgtgcccaatgatgccgactcacccaagttcaagacgacggtggggagcgttaagtgggtccccgagaacagcgagatcgtgtggtccatcaagtccttcccggtgagcactctgtccagacatccacgtgccccctgcgcctgtctctgcaaggcagcctgggtgcctcaggaccccctgcacctcaagatggggtgacagtggccactgtgtcttccacacctggggcttctgaaagggtggacggagagctgaggactggagtgggaggaagcagaggctgactcggcccctgggcccctttctgccttcctcttgtttgtgaaccagcctctgtcttcacctcagggcagtgccctctccctccctctctgtgatgcccctgagtactgatgtgagatggggctcctgtccatgcaggccctgaaggagccccgtccacactggcaggtccaaggccctttctgtgcaggctcagccttgcctgccatcaaggggaacggctgcctgtaggccggagcagcacagcctccagagctccgcaccagccgcccatgtcctgggccagctctgcatcggcgtggcttccctgacaacatgttaaggattctgaggagctgagtctgggcttgccgggtgtacacagtgcacagagaggctaggcccaggcatggctctggagctgagccgggtggcactgacctgctccaccaggggggctcagggcaggcgctgctttccatgttctcccctctctctccatctgcatcccagggggacttggggacagccccagctgagttaagctggaaatgctgcaattcaagtgccttgaatttcatgatggtactttccctcccagcctcagtctaatcacatgacataaaatacagaaagtagaggaaggagagagaaaagccagttaccccaccacctaatactcccgtcagcctttccgcgtgtctcctcacctttctttctgcgtattttgcttttcctcattatgtgcaagtagagccagctcagtgcctgcccttccacgtggcgctgcggcagagcgttttccttctggtattgactgtcttcttggcggtcacctttgggagctgtggatattccatggaggggtggtgaccatcccggatagttggattagctcctcttttcctgcaattccactgttgaaaatagtgtttatcatttaaaacacactgggagaatacttcatcaaataaacagcatggtgagctgtagacgggggaggaagggacagggctaagggccgagacacaggctggcgtggactgtgcttgtgtagattttacttcgaagccatgcacaggcacacctcattttattgtgcttcccagatactgcatttttatttttgttttagtttttaaacaaatggaaggtttgtggcaaccctgcgttgagcaagtctgttgatgtcattattccaacagcatgtggtctctgtgttgtcactttttagcaataaagtatgttttaactaaggtatgtacattctcctagacataatactgttgcacattcagactacagtatacggtaaccttttttttttttttgagacggagtctcgctctgtcgcctaggctggagtgcagtggcacaatctcggctcactgcaacctgtgcctcccaggttcaagtgattctcctgcctcagcgtcctgagcagctgggattacaggcatgtgtcaccacgcctggctaatttttgtatttttaatagagacggggtttcaccatgttggccaagctggtgacgaactcctgaccttgtgatccgcctgactcagcctcccaaagtgctgagattacaggtgtgggccaccgtgcccggctggtaaacgtaacttttacatgcactgggaaaccaaaaaatgtgtgtgacttgcctaactgtgctatgtgctttatggcagtggtctggaaccaaacctgcactgtgtgaaggtacacctgtcagtgcttcccatgcatagaaaacaaaattaaatcacaatggaaaaaaggtaattcctaaaaaccaaaagcaaaattaattcatcagcgtatcaagttgatgacaaccacagagacacgtcacttcaaataacacaccctaaggacaaaaggaactgcaaaaaataaattttaagaaatacagagagggccaggcgctgtggctcacgcctgtaatcccagcactttcggaggctgaggcgggcggatcacaaggtcaggagatcaagaccatcctggctaacatggtgaaaccccgtctctactaaaaatacaaaaaattagccgggtgtggtggtgggtgcctgtagtcccagctactcgggaggctgaggtgggagaatggtgtgaactcgggaggcggagcttgcagtgagccaagattgcaccactgcactccagcctgggcaacagagcaagactctgtctcaaaaaaaaaaaaaaaaaaaaaaacacagagagagattagaaatacagattagatagatagatagatatccttccccctttcttagattgctccatactaaaagtttttttttttttaggttagttttttttgtttctgagatgaagtctcactctgttgcccaggctggagtgcagaggcacgatctcggcttactgcagaggcatgatctcggcttgctgcaactccacctcccgggttcaagcgattctcctgcctcagcctcccaagtagctaagattacaggcacatgccaccacacccagctaatttgtgtatttttagtagaaacagggtttcgctattgttgctcaggctggtctcaggtgatctgcctgcttcggcctcccaaagcactgggatgacaggcgtgagccaccatgcctggcctattgtgaataatgctgctgtgaacgagtgcacaaatacctcttcaagatccagcttccatttgttttgggtgtatccccagaagtggaattgctggatcatatggtgattctattttcaactttttgtggaagtgccatagtgtaggctatttgcttttaaacctagagtgtttctcagtcctgtccctactgctgtctgttaccaggttagggaatttgatatgtgcccatgggtggccatggcacatgacactgtccacctggatggagatctgggccgggccttgcgtccaggccttctcctggctctctctgcatctcctatagcacctgcttcacagaagttgctgccatgttacttcatgcgtgggtacctgtgactattgtgttgtccctgtggcttatgggacggcagcctctaggattgtggcctgtcctcctgtgcacctttctcccttgtgatgatggcagccctgtcctcttttgtctgcctttggcagcacgcctgtcaatgcctgttcttcctacccggggagcccttctcactgtgcctttgtggcgtcgagtgggttttggtgtgtgagccggcgccagcctacagctctcatcgagagcagaattaaacccactcggctcaacgtgacgacacaggctgggtgtgcaggcctccatcgcccctggcgtctgcttccctgcattttctttgtttgtgttttccatttggtctttgctaaggttcagatttggggtctggctgagtgtttggggcacaggctagtcaccgagcgggtttgttccctcgctgcctgctttaccagttgctgatgtcgcatcttccccccgtcatcctcctggagtctgtactcagcacatgtcaccaagtcaggcagagtcctcactctcacgctgccctggtggcagtaggcagagatgaaccactcggccctgccccaggtgcacggggaccgcccctgctgtgaggcagaaacagccctaggcggcagtagctcccacggaacctcggcctgagccctggggagcagagactgtggggtcccaggcacagccagagctgagatcgtgcccccgactgctcagggcgagaccaggcgctgggggtgaccaggctgcaacctgttgctcctcaaggcagagagagggtgaaggtcacagccaggactcgggttccagtcagagccacagccaccccctgctcaccctcaggagcaggacccagggctgaatcgtcactcagtgcatgctccttggtttcttccttttgtcgcctctccctggtcatggttctcacctggacactctcttttctttcacatgctgttctgagactgggcgtgtggcccctgtccccagcagccctcccctgccacggtcattacacactcttccttcccatggccggtctgtctagttcaccagccttggaggaaagtgcattaggggagctgggcggggggtgctgggccactgcagaccacactggcaggggcttggtgactggggctggcagcttggtgagctcagctctgggcgcctgggtatcctcatggggcagctgggcaccccagagcaggggctgtccttaccagcctggggcagcacagggccgagctttggctccccagcacaggggctcatgctcccctccctggactggggtgagtggtcagtctctgcccatcgccactagggccagagctgttggctaagctggggcagggcctaggcctgagcgcctcccccgtctgctccccagggcggcaaggagtacctgatgcgggcccacttcggcctgcctagtgtggaggccgaagacaaggagggcaagcccccgatcagtgtcaagttcgagatcccttacttcactacctccggcatccaggtacgtaaggcccaggcggccggggcccagaacagggacagaggccgcaggtgacagatatcaatgcagccagcttgggaaagggtgtcagtcagctgcaatcaggaccctgctgtgctgtgggcctctgcctccccacagacagggtgaggccaggctgcctctgctcagccctgacccctgagctcaaagctcactcattctgccccaaactagcatttgaggctctgccgtccactcatgccccatgggacctcttttccctggcaccccctcaaaagcccacagagggaggagaggctcccagagagccaggggccttctggccgggccccccaagcaggctgctgaggccgtgtctgcaagccacatcctggctgctcaccacttccagaggcggctctgccctcccacacatttgcatggtccagacaaatccctttcacccccctgaggcctgtgctcatcctgtcgtcatggcctcccctgccagccccaggctgccccagcaggaaagattaaggggggaccaacagggcgggagcctgcggtgctcagggccctgctacctgtgccccaggtgcgctacctgaagatcattgagaagagtgggtaccaggccctgccctgggtgcgttatatcacgcagaatggaggtgagtgaggccctacccgtggggtggggttgtactgaggggtcctctgtggctgcccccagggtggagccatcgggtcgggtcccgaaagcagggagggtgcagagcccagcatgacgcctccctcctgtctcctagattaccagctccggacccagtgaggggctgtcgcagccaacaccccggcctcggggctcctggtggcagcaccaggggacacacctgccaaacccaccagatggaggggccctccctggtctctggccaccctcccagcctctgcccagggacccctgccttccccaggccatctgctctgccgtcgacactcgtctcagaagcccctttcccagaagaggctggtcttcaagaagtctcgtttctttgcccctgaagtcagtttcaggggaaggatgtgaaatttttccgtgtagaggttacagccttttatgctgttgagctcccaggtaccaaaaagcttggccaacgcttgccagccagccagctgcaggtggcatctgccacgaaggaagcgccagcctcgccaggccagcaggggcgtcgttttgttgccattttgttgaacgttatgggtttatgggtgttcctggaacttgtctttgtgcattcgttgctgtttgtgttaccctcactgtccccatgtcccacccacgtcctacggcactcaggaagcacttggtgaggacgagccctcacccttcttgtcttccttcccggcagcgcccgcagcgggccatttacacgtcgaggctggcacctggcgcgctcgggggccactgtagcgtctgcctgctccctggactcgcaggcctcgcctgtggcgccttcccagggccagcctgggtcacgagatgctgtcactcagccagatcagtattgacccaccaggggaggtggggtttggtgagagacgccagcctcagactttttcccactgagggtccagagagcggggccacgtgtcacccacgtctgcgcttggtcacccgtcctccccaccctgtgtgtgtttatgtcatagttacattaaattccattcattgaatactccacagccttcctctgatgcagcgtggtcccaactcctcctgcgtgaccacagggcttgcctggttttgtcgccgaccttccctgtggccccacgaggtgtcaccagctccctctgcttccccagctgaaacacaggaaaagcagctgcgggaagaggcagctgcagtgctggaccatgggccaccactcctgggccacacagaggaggccacagaggcagagtcttctctcatccaatctgctgcaccctcagatggccaacagcttgtccccacctctccccaaactgatggcccactcagagcatggtccttgtgtccacagcagcatcccctgtgtcctagctagaaatgcaggttcgtgggccagccctgacctgccaaagtggaggctctggggccagggtcccggaaaacattaacaaggcccccagatgcttcttctgtgaactgctacttggtccatgggggaaatagcacatatgcaggaagtgctgcctgctcttggccccctccccgaccagtgctgatggccctgcctggccagcaccctcttgccttcattctccccctccctctcctgtcttgccgagctcgtcctcaggtgtctagtgggcatccgacctaacagcctgagtagaaccttccgcccacgtaggtcttccccatctcagtcaatgacgctgccccagcccaggcctcagaccaaagccctgaaggcatccctggggcccctcccctcactgtccacacccatatcagcagccagccctcatggcccctccagaaaaccctggggctgaccccatttgccatcctcgctgccacccccggggcctagctccagtgtgggctgtcactgtccccaccctgtggagcccccatgctgggacaccgcagggacaggagagggctggtccacaggacagaagagagacttcagtttccagcaacttatcagataagacctgcaaaccctccactacagactgtagaaatgcaggaaatgaagcagacgcacctagccgtgcccataaaaaagcaaggagacccacaggagcccaagacgaaggaagtagacgcggaagacaccgtgggggctcacaccggagttgctcttggaaaccaccgggtttaggtttgggggccaggtggcagataggactttgggcatcgggaagatggtgaaatgcagtggagatgactcctgcgtgaagctgggatcctcgagggtcatgatacttaacagtaaaaagatggactagaaaaaacatttgccctccacccctgagaataagcactgtgtcctctctctgcctgagatccacaggagaaaaagtcaccactcatttagaccccacgcttgtaatatcaatctggtttgcagacaaccaggccaagatgtttatgacagaaaacctccctggagggacctaacttcatgccttgttacctaagatcctcgcacacaatagaccctcaacatgagggcacatcctgaaaattacaaaacacgtgcatgaaagcaaacttgaaacagcaggatcagatcctcacgaacttcaaagattatcggcatgtaaacaaatacactatgcagtcaatctgttgcaagtgcctaaaggcacagagactctgaatagaaaagagcaaaatgctgttaagacagagctgttacaacatccaacaaggcaaataatttgcatgcgggttataacgtctacaaatcagaaaaagagaacctaacaaaatgggctgtgtgtgaacagacagtatgaagaagatgaaatacaaatggcgaccgttcggccaggcgtggtggctcacgcccgtgagcccaatactttgggaagccgaggcagaccgatcactggaggtcaggagttcgagaccagcatggccagcatggtgaagccccatctatactaaaaatacaagaattagccgggtgtggtggtgcgtgcctgtaatcccagctactcagtatgctgaggcaggagaatggcttgaacccaggaggtggaggttgcagtgagccaagatagtgttactgcactccagcctgggcaacagagcgagactccgtctcaaaacacaacaaaaaccggcctagcgcagtggcttatgcctgtaatcccagcactttgggaggctgagacgggtggatcacctgaggtcaggagtccgagaccaacctggccaacatggcgagaccccatctctactaaaaataccaaaattagccaggcatggtggcgggcgcctgtaatcccagctacttgggaggctgaggcatcagaatcatttgaaccccaggaggcagaggttgcagtgagccgagatcataccacctgcactccagcctgggcaacagagcaagacttcatctcaaaagaaaaaaaaaaggcaaacgttcaaccatgtagctattcaggaaatatgtacacataaaccaagaccacagttagatgctatttgcatcatgtcggccccccccaaaaaaatttttttttttgagacagggtcttgctatgttacccaggctggagtgcagtggcgtgatcacggctcactgcagcctcgagctgccaggctcagccaatcctgcctcagcctcttgaggagctgggactacaagcacatgccaccatgctgggccaatttttcatattttttatagagatggggtctcgtcattttgtccacactggtctccaactcctgggcttgagccatcatcctgccttggcctcccaaagtgctgggattacaggcgtgagccacctcgccacgcctcctgaacatctagaacgtgctagctatgtactgactgtgggaaagttgagaacatcctccctgaagtcatctttatgccagaattctcttgcagaactctagttgagaaaagccctgagaagtccatgcaccaatatatagagaaatatcaggtgtacagttacacttacagcagcatagttcatgatagcaggaaattggaaagcaaccaaaagtccttcaataggaaaagggaccactgtagtccattcatgcaagagattacagcagtgaaaatgaattcaactagagcagtgatatggctcagaatacaacttaaacaacattgagcgggaaaaatgtttacaaaagaaaatgcagtaatctagtataaaatacggaaataatattttgcgtgcttagggatctatatatatccagcaaaagtctaacgagatgcttgagaatttgaaaaaattcacatccctggttatctctgaaaggcaaaaacaggaagggggtatgactggggcctctgctgtgttggcaatttccttaagcttggtattgcttagtggcttgttctgtattctttctttatgctttttttttttttttttgacagggtgtcactctgttgcccaggccaaagtgcagtggcatggtcacggctcactgcagcttcaaactcctgggctcaagtgatcctcccaccttggcctcccaaagtgctgggattacaggcatgagccacagtgcccagccctttttgtagttcttaatatactttttgtagtttttttgttttttgtttttgtttttgttttttttgagacagagttttgctcttgttgcccaggctggagtgcaatggtgtgatctcggctcactgcaacctccgccttctgggttcaagcaattctcctgcctcatcctcctgagtagctgagattacaggcatgcgccaccatgcctggctaattttgtatttttggtagagacgggatttctccatgttggtcaggctggtctcgaactcccggcttcaggtgatccgcccccctcaccttcccaaagtgctgggattacaggcatgagccaccgcgcccggccagttctcttttttttttttttttttttttttttttttttttttttttaagactgcaaagctgggcatggtagtatgcacctgtagtcccaactacttgggaggctgaggctagaggattacttgagcccaggagtttaaggacagcctgggcaacatagtgagaccctgtctctaaaacaaaccaacaaaacaccccccaaaaatgacaatgcagatttggaagaaaaaaatagattaaaaatgtagtcataggaattaacaacttggggccgggcatggtggctcacgcctataatcccagcactttgggaggctgaggcggccagatcattttaggtcaggagtttgagaccagcctggccaacatggtaaaacctgattgctactaaaaatacaaaagaattagctgggcgtagtggctcatacctgtaatcccagctactcaggtggctggggcaggagattcgcttgaacccgggagatggcgctcgcagtgagtcaagatggcaccgttgtactcttgcctgagcgacacagtgagacactgtctcaaaaaaaaaaattaacaacttggttggagggtgttaaaatacaagtgagacatagatgaagagaattagtgcactagaagagagctgtctgaggcagttacccgggacatagcacagctaatgagacatatatatatttacagtcaaccctccacatccatgggttctgcatccatggattcaaccaagagtgagttgaaaatatttgaaaaacaattgtgtctgtgctggacatgtacaggttttcttttttattgtcattattccttaaataatacagtataatgattatgtagcatctacattgtattaggtaatctagagatgatttaaagatgatgtgcataggatatatgcaaatattgtgccattttatataaaagacttgagcatcctcagattttggtatccaaggggagtcctggaagcaatcccttgaggatatggagggacgactctgtgtgtgtgtgtgtgtgtgtgtgtgtgtgtatgtgtgtgtgtgtgtgtgtgtgtgtgtgatgtgcgtgtgtggttagcacaagacaataagaaggcccaacatgccagcaagtatctaacacaaaccaaaaaatgagaactggggagcagccacatgcaaagagatcgtggccagaattttccaaaattaatgaaaatcttgaagtgttttttgtttttcattttgacggagtttcgcgtttgttgcccaggctggagtgcaatggcgaaatctcggctcattacaacctctgcctcccaggttcaagcaattctcatatctcagcctcccaagcagctgggattacaggtgcacaccaccacgcccggctaatttttgtattttttgtagagatggggtttcactatgttggtcaagatggtctcgaactcctgacctcaggtgatctgcctgcttcggcctcccaaagtgctgggattacaggcatgagccactgcgcccagcctgaaaatcttgaaattttaagatccaggaaaccgttgagtccaaagcatgatacacaaacctaaattcgtaactaaaataatcatagtcgaaccacagaacatatcagactcagggaagatcctaacagcaacactaagagattaaaatgtctctccaaagagcaattggacagagaactggtttcacaactggaacaacaaaagtccgaagatagagcatggcttcaaattactgagagaagtgcagtctagaattctgagcccacctcatctgtaaaaggtaggacaagccgggcatggtggctcccgcctgtaatcccagcactctgggaggccgaggcgggcagaggtcaggagtttgagaccagccggaccaacaaggagaaaccccatctctactagaaatacaaaattagccaggtgtggtggcgggcacctgtgttcccagctacttgggagactgaggcagacagaattgcttgaaccagggagacagaggttgcagtgagccgagatcgcgccactgtactccagcttgggcaaagtgagattctgtctcaaaaaaaaaaaaagacaagataaaaacaatttatcaataacagattccccgaaaaaaggaacttgtgtacataaggaaaggaagaaagatgtgagaaggaatgccggaaaaccttagaaaccattggatctgtctaaactgtcattgactgtgtaaagcaataataacagtgactaacgtatagagtagcgacaaaaggcgcaactgaagtactagacaacatcctggtgttcatgcctttcaaggtcactatgctatttgggaggagattcggctaaagtccacgagggccacgtatttatatataatttctagaccagtggttggaaaagggttgaaagaaaacttttaacagattaataggaagaaggaaaagagaaggaggcgtagaaaaatcaggaggcactgggcgcggtggctcacgcctgtaatcccagcactttgggaggctgaggcaggcggatcacctgaggttgggagttcgagatcagcctgactaacatgagaaaccccgtctctactaaaaatataaaattagccgggtgtggtggtgcatgcctataatcccagctactcgggagggtgaggcaggagaatcgcttgaacctgggaggcagaggttgtggtgagctgagatcgcgccattgcactccagcctgggcaatgagcgaaactccatctcaaaaaaaaaaagaaagaaaaagaaaaagaacaatcaggaggccaggttcagtggctcatgcctgtaatcccagtgctttgggaggctgaggctgagacaggtgaattgcttgagcctaggagtttgagaccagcctgggcaacatggagaaactctgtctctacaaaaattagccaggcatggtggcgcacacctgtagtccaaactactcaggaggctgagttgggaggatcacctgagttcaggaagctgaggctgcagtgagctgtgattgcaccactgcactccaggttgggtgacagagtgacaccctgcctcaaaaaaaaaaaataaaataaaggaaaaatcaggataaatgcagggatgttctaaactttttaaaataataaataatagtacttaaaactgcactgggacttttgggacacccctagcatctctggctgcagaaagcataaaataagattgtagaaataaatccagatattaggaaccacaacaggtgtaaatgaagcaaagctgctagttgaagatgttgtcggattgaactgaaatacaaaatcctgtgatatcctgtttatacgcgatacatctaaaatgtaagtacacaacacaattgaaagtaaaaaaacattaaaagatgtgacacttaaaatataagcacacaacacagttaaaagtaaaaagacattaaaagatgccaaaagaaatctcatatggttatattaattccagacagaatagatgtatttatttatttattcattcatttaattttttgagatggagtctcgctctgtcgcccaggctggagtgcagtggcgcgatctttgcttactgcaacctccgcctcccgggttcaagtgattctcctgcctcagtctcctcagtagctgggattacaggcatgcaccaccatgcttggctaaatttttttatttttgtattttttttatttttagtagagacagggttttgccatgttggccaggctggtcttgaaccctgacctcaggtgatccacccccactggcctcccaaagtgctagtggcaggtgtgagccaccacacacggccagaatagactttaaagcaagaaagcaaaagaaaaaatgtattagatccccgagaagtttccacacaactccaagaattattattagagttcccactctctgaggaattttcaagagaaattagttagaattcaacaagaaataaattactttaaaatatttccaaatatgagaggttttttttgtttttgtttttgtttttgtttttgtttttgttttgagaaagggtctctgttgcccaggctggagtgcagtcagtggcacgatgtcagctcactgcaaccttggcctcctaggctgaaatagtcctcccatctcagtctcacaagtagctgggattacaggtgagcaccaccaagctcagctattttttttttttttttgtatttttagtagagatggagttttgccatgttgcccaggctggtcttgcacttgggctcaagtgatccacctgcctcagcctccacagtgctggaattacaggtgtgagtcaccatgcccagccaatatgagagattttaaagcacatttttcaatcaccatgtgtcaaagaagaaaatataatggaagttagaaaatattagagaatggccaggtgcagtggctcatgtctataatcccagcactttaggaggctgaagcaggtgaatcacttgagctcaggagttcgagaccagcctggccaacatggcgaaaatccatctctactaaaaatacaaaaattaaccaggtgtagtggcacacgcctgtaaatcccagctactcaggaggctgaggcccaagaatggcttgaaccctggaggcagaggttgcagtgagctgagattgtgccactgcactccagcctgggcaacgaaacgagagtctgtctccaaataaataattagagaatatttttcaatctggatgcaggtgacatgggtgtgctctcgagaatccatcaagcattgatgatttgcacactcttttgtgtatatgttacacttcagcaaaaacattcacaaaggggaaaaaggcaaaagatacttaaagcagccagaggtaaagacacatcaccttcagacatgacaaccagacagacagacagctggcttttcaaaggaacccagaaaacagttgggtgacattttcaacatgctaaaagaaaaccactaacccaaatcagagacccagcaaaagtatttcaagaatgaggttacagtaaaaacattttgcagacaaataacgaaagagtttgccagcagcaggctaacactaaagaaaattgtaaacagtgtactcacatcaggcacaaggaaagtgatctcagacggaagggcatgatgcaagaagaaataaaagcaaagaagtagaaaatacatgagaaaatctagacaaagattgcataaacagtttctggagtttttttaagtgatagaattatacaacaggaaaaaaagtctgcagggagtaaactgagttaaaatgttccaagttaatgactgtctgggaggagaataaataacatggatacactttgggaggccgaggcgggcggatcacgaggtcaggagatcgagaccatcctggctaacacggtgaaaccccgtctctactaaaaatacaaaaaattagccgggcgcggtggcgggcgcctgtagtcccagctactccggaggctgaggcaggagaatggcgtgaacccgggaagcggagcttgcagtgagccgagattgcgccactgcagtccgcagtccggcctgggcgacagagcgagactccgtctcaaaataaataaataaataaataaataacatggataaaatttgttgtttgttgttgttgttgttgttgttgttgttgttgagacggagtttcgctcttgttgcccaggctggagtgcaatggcgcggtctttgctcactgcaacctctgcatcccgggttcaagctattctcctgcctcagcctcctgagtagctgggattacacgatgcgccaccaggcctgcctaactttgtatttttggtagaggcggggtttctccatgttggtcaggctggtctcaaactcccgacctcaggtgatccgcccgcctcggcctcccaaagtgctgggattacaggcatgagccactgcgcccagccaaatctgcattttgataagtatgcattttactatctaagggagctaaaacatttttattattttagcactgtaactttgcttttcttctttgttttgtttttttgagacagagtctcactctgtcgcccaggctggagtgcagtggcgtgatctcagctcactgcaacctccacctcctgggttcaagcaattctcctgcctcagcctcctgagtagccaggattacaggtgcacgccaccacacccagctaatttatgtaattttatagagttgtggtttcaccatattggccaagctggtctagaactcctggcctcaagtgatccacctgcctcggcctcccaaagtgcggggagaccagaattccacccagaatgacctctctgttcctaggagtgtgacagcatttgggggggaaaatagcgtagagttggaatttttaaaattcagtttgacaaaatgacttttagctggagcattaagtccctttacatttaatgtaataactgatattacatttaagtataaatttaaatctaccgtcttactttgttttctatttttgtcctttctatgttctcttttatgtcctctctggatttattacagattgtttgtggcttttaaaaaaagtcattgcttgaatgatgagagcttatatttaaaaaggcagggggctaaaataaataaataatttaaaaaataaaaataaagtcattgttttcctttgaatgtttgagagttacaattctaggctgggcgaggtggctcaagcctgtaatcccagcgctttgggaggccagcccaggtggatcacctgaagtcagcatcgtgaaaccccatctctactaaaaatacaaaaattagccgggcacagcggcatgtgcctgtaatcccagctactcgggaggctgaggcaggagaatcactcgaacctgggaggcggaggtttcagtgaaccaagatctcaccatttcactctagcctgggcaacaagagcaaaactccatctcaaaaagaaagaaatatatatgagtagatattaaatgtgtacacatatatacatatataaaggctaaaataatgatctaagcctccatctcaagaagttagaaaaagaacaacaaaataaatgtaagagcacagaaagaaggaaataatagggagtagatacaaagaaaatggaaaagaaacactcaataaagaaaatcaacaaagtgagtttatttaaaaaaaaatgaatgaaattgaaaaaccgctagggaaattgatcaacatgaaaagaaagcacacatagctgttactggaattgggttgggggagacattactatagatttaaagacattaaaacgattagaacaggacacatgtctagggttgtgtgaggtattcacttcccaagggtagagagcttctgctcaccaagctgtgatccctggcctagagttccagccacatagcgagaaaggggtttctttttctaattcacaaaacacgatacaggctagtggacccccaaataaaagaatatttagaataaaaccctatcaaaaaaaaaaaacaatagctagaacagtatgaacaatgctaggggctgggtgtaggtggctcacgccggtaatcccaacactttgggaggctgaggcagctggatcacctgaggtcaggagtttgagaccagcgtggccaacatgatgaaaccccgtctctactaaaaatacaaaaaattagttgggcatggtggcaggcacgtgtaatcccagctactcgggaggctaaggcaggagaatcgcttgaacctgggaggcggaggttgcagtgagccgagatcacgccactgcactccagcctgggcaacagagtgactctgtctcaaaaaaaaaaaactacacttgatcttagccaaaaggccaagacacgataaaataataataataataaatgatgctaaggaaaagagtgacttgctgaaggacgttgtccccattatgtgtgcaaagtttaaaattacatgaaacaaaatgatgtattatttatggccaaataataaaagatagagccatcatcagcatgtctgtgatggcctaagaccatcttttaataaagattgtaattcaggtcattcccctcccctgctcaaaatcctcccatggctctccagtgccctcagagtaaagtccccgctcccttgtcctccgggtccagctggtcctcctctggcttccactctcgcctttcctccctcttcacctgccactcgcgcctctttgccccaagcttgttctcacctcagaacctttgcagttgccagtgccttctgtctggtgcacccttgcctccgctgcctccttgaaattcattgctcaactcaagtgtcccctcccctccagccactccagcttgtcgaaacatgcagctgtgatttgttccacttttgctggcacacccctggtctgcctagaagttccacaaggacacccccgccccatctgatttgtcactgctgtgtctctagggtccagagcagtactgctctgggactgggatctggggatgcaaggctctgccagccgtgaccaccagggggcatccacgggtcagaaaccacggcttggagacccacccggccaggccacagagagaggtgtgcgggacaggcctgggaagagggagactccagccctctctgaacacagcgaccccaacaccactgctatccttcctgagggtcctccctgcagcctgatggtgaagatgaggaaactgaggctcagaaaggccacaggggacgggcgcggtggctcatgcctgtaatcccagcactttatcacttgaggtcaggagttcaagaccagcctggccaacatggtgaaaccctgtctttactaaaaatgtcaaaaaaaaaaaaaaaaaaaaagctgggcatggtggtgggtgcctgtaatcccagctactcaggaagctgagacaggagaatcgcttgaacccaggaggcagaggttacagtgagccgagaccatgccactgcactccagcctgggcaacagagtgagactctatctcaaaaaaaaaaagccacagaaatgtcaaacactccttccccctcctcacaggacattgacagggaagctacagatggagggtgggtggggacgctggggtccctggcctggctgggaggaccaagtcagggcagccaggctcagactgaccctgctgtccatgaggagcctcagctcacacaggcagcccaatccctgcctgggttcagcagctcccattgcacacatggggaaactgaggctcagagacaggctggagctggactctgtacaccagaacccggcaggtcctgccacaccattgctgcccaacgaatcctccccagctgccatctgtgctggggcttggggactcagtgtggacgacagcaggcgggtgcccctcacccacttcccaccagttccctattcaatagatggagaactgagtctgagcccacccagcttcatccaggggctacaaactcagactaccccccacaagaggaaacgcccagtggcctgcccctggagtgggtagggaagccccgtgttcaaagctgtgccccacaaacctggctccccgtgctgtgtgaccttgaacaggctccttgccctctctgggcctgtttctctgtccactgggggcctcttcatgccattttgttagaagagtctctaaaagaagaaaaagatcacttgtcaaccaattaagaactgctcagatgctctttctaagcactgaggttcttttacatgacacaaagaccctgatatggccagtgcgctgttgtttattgaaattgaggtgaaattcacataacacatggttaaccattttattttattttattttttatttgagacagggtctcactgtgtcacccaggctggagtgcagtggtgcgatcacagctcactgcagcctcggcctcctgggctcaagcgatcctcccacctctgagtagctgggacaacaggcgcatgccaccatgcctggctaatttttgtagttttgggtagagacagggtgtcactaggttgccagggctggtcttgaactcttgggttcaagcgatcctcccgcctcggcctcccaaagtgctgggcttacaggtgtgagccaccgtgcccggctacagttaaccatttgaaagtgaacaattcagtggcatttaggacatttgcaatgtcgtgcaacctctgtctgattccagaacatttccatcaccccaaaaggaaaccccgtccccatcagcaatcactcctcattcctcttccccagccccaggtaacaccaatctaccttatgtctctatggatttgcctgttctaggcatttcatatcaatggaatctcacactacgtggccttttgtgtctggcttctctcactcagcattgtggggatttatttgtttgtttgtttgttttttgagacggagtctcgctctgtcgcccaggctggagagcagtggcacgatctcagctcactgcaacctctgcctcccgggttcaagcgattctcctgcctcagcctcccaggtagctgggattacaggctcccgccaccacacccgactaatttttcgtatatttagtagagaaggggtttcaccacattggccaggctggtcttgaactcctgacctcaactgatccgcccgcctcagcctcccaaactgctgggattacaggtgtgagccaccatgcccggccaacatcaggtttttgaggttcacccttgtcacggcatggatcagcgctgcattcctttttacgggtgcataatatcccactgcatggataactcacattctgtgtatcagttcatctgccaacaaaaatgaaggctgttaccacctttcagacatcatgagccatgttatgaactttcacacacaagtgtctgtttaaacacctgctttcaattattcccggtatatacccaggaatagactccctggatcatatggtaatgttaggcttaactttctgaggaatttcacaatttcaccgtgtgtgtgtgagtatgtgtgtgtgtgtgtgtgtatgtgtgtgtgtgtgtgtgtgtgtgtgtgtgtgttttataaggcccctggccaaactgggaatatagtgcctagaaatttctggcaagttcttttctctgagcgctttcctctgcatcaacccgtccctcccaccagagcctgctcgaccctggctgaccatagtccccttccaaagcgaccccagcccgcccagcctcagggcagtatctgcacctgtgttatgtccccatcatccatgctttgaatgctactgatattttgtatacttaaagtgctacccaggctgggcgcggtggctcacacctgtaatcccagctctttaggagccgaggcaggccgatcacctgaggtcaggagttcaagaccagctgggccaacatagtgaaaccctatctctattaaaaatacaaaaaattggtcggacatagtggctcaaacctgtaatcccagaactttgggtggccaaggcgcatggatcacctgagatcaggagctcgagatcagcttggccaacatggtgaaaccccgtctctactaaaaatacaaaaattagtcagacgtggtggtgagtgcctgtaatcccagctactcaggaggctgaggcaggagaattgctcaaacctgggaggcagaggttgcagtgagccaagatcacgccactgcactccagcttgggcgatagagggagactcagtcttaaaaaaaaaaaattagccaggtgtgggggtgcgtgcctgtaatcccagctactcaggaggctgaggcaagagaatcacttgaacctgggaggcagaggttgcagtgagccgagatcagaccactgcactccagcctgggtgacagagcgagactccatctcaaaaaaataaaaataataaataaaataataaataaatatataaataataaagtgctgcccaaattgttttgttttagagattataaaaacagaaaaagggggtgggcacagtggctcatgcctgtaatcccagaactttgggaggccgaggcgggcggatcacgaggtcaggtgatcaagaccatcctggctaacagtgcgaaacctcgtctctactaaaaatacaaaaaattagctgggcatggtggtgggcgcctgtagtcccagctactcgggaggctgaggcaggagaatggcgtgaacccaggaggcggagcttgcagtgagccaagattgcgccactgcactccagcctgggcgacagagcaagactccgtctaaaaaaaaaaaaaagaaaaagagagatgacccatgacccatctctcttcttggagctcctgtgggctcaggctggagaaagttagtgggtgtgtccttctgattagaggacccctcaccacccagactcttctggcaatctccagcttattttacaaagcccagctctgatgacccctccttcaggcagccctcctggatctcccaggaaggtcctggctctggcttatccctgactattcagagctgggctgtgtcgtgaaaggcctcagtgctctcttcctttgctttgcctttttttttttttttttttttttttgagctggagtcttgctctgtcgcccaggctggagtgcagtggagcgatcttggctcactgcaacctccgcctcccaggttcaagcgattcttctgcctcagcctcctgagtagctgggactacaggcgtgcaccaccacgcccaggtatttttatttatttatttgtatttttagtagagatggggtttctccatgttggtcaggctggtctcgaactcctgacctcaagtgatccgcccgcctcagcctcccaaagtgctgggattacaggcgttagccatcatgcctgaccagttctctttctttggtgctcacccttttgtccaacaccccagagacgcttctgagacccatggtgcttgctgaaagcatctgggcaccttctcagtgctcagcccttgtccaggcccacaggcagctctctgcccagtctgagtgtcccctgaactctccagccccactcctgaccctcattcattcattcgtttgagtatttatggagcacctgctgtgtatgtacagagactcaactgacacagacagacaaaaccccagtcccggggagtcatgggatgggagacagatgaccttgactgtcaccacatggcacatgggttgtcgggcgggcaggcgcaggaggggaggcgaggacacagcaggatggagaccccaagtccctggagacggggccctgtactgggggctggggctgtgaggagggcacgggggagccacagcgggttctgggcgtcaaggccacctctggccgccgatgggagagggaggaacccgggcaggagggaggtcagggcgccagggcgggagcagggagcgatggtggggccccactggagagcgggtggggagggaattgtgggatttgggtgcagccagagagagtggaagaggctgaggccagcagggttgtgggggtggggaggtcatggggtgagggtggcgtggaggggcccccacaccctttgggcagcatacacatctgaccaaagattcagttcctcaaaaatgccacattggcgcgtgtgtgcacatgggcagagcatgcacacggacacgcacgacacacacaggcacacacacctgcacacagagacacacgatatacagagaggtatacagacaacacacacaacacagacacacacacacaacacatggatgcacacacacacagacacacaacacacagagacagagacacagagacaccacacaccacacacatacaacacagagacacacacataacatatgcacatcaaacacaactacgctcaacatagagacagacacacacagagacatgcaacacacagagacacacacagagacacacatacaacacacacagacacatacgcagagacacacaacacacagacacacagaaactgacaacagacacacatacaacacacacgtacaacacagagacaaacgcataacacagatgcacacatacaacactcacacacatcaaatacaactacacacaacacagagagacatacagcatacagacacacatataacacacacaacacatgtgcaacacagatataacacatagatgcacaccaagcacacacaacacacacagacacacaaaacaaaactacacacacaacacacagacacacaacatgcacagagacacaagcatacaacagccacagagacacacagacaccatgcatacaacacagacatacacatacatcgcttgaacccggaaggcggaggttgcagtgagccaagatcgtgccactgcactccagcctgggtgacagagcgagacaccgtctcaaaaaaaaaaagcccattttgcagaagaaaactgaggtcagagagcagaggcaatgtccccaagctctgaatagtcaggagtgagctggagccaggaccttcacgtggcagggacacagggcaaggactggcacgtgccagctcccaagacagcaggctgggagcctccctgcagcccagaacattcccatccccacggcagttcctgcagggcccctcccccgccccgcctgccctgacgctgagctgagcacatttcccatcccacccctggctctgttccattccaagagaaacaggttgcacctgcacagttcccagaaggccctgggcagcaggaggccagccacgtgagtgggtgtgtgtggagacgtgcagtcacattgcagcccccaccatgccactgcgcaggaggagcagggccacgggtaacagagccactaagaggggcgtgtggggcactgagcactcaagcactggagccagccagacctgagtaccacccaggctcagccacttgccagcctttacctcaaaggagggaggagggttttttttttttttttttttttgagagtctcactctgtcacccaggctggagtgcagtggtgtgatctcggctcactgcaacctctacctcctgagttcaagcaattctgtctcagcctccctagtagctgggattataggcatgtgctaccacacctggctaatttttgtatttttagtagagacagggtttcaccatgttggccaggctggtctcgaacccctaacctcaagtgatctgcccgcctcggcctcccgaagtgctgggattacaggcatgagccactgcgcctggccttcttctttttttttttttttttttttttttgagatggagtcttgctctgtcacccaggctggagtgcaatggcacaatctcagctcactgaaacctctgcctcccgggttcaagcgattctcctacctcacaggagggttctatgagggggcttgggagatgtgtgcaggaggggccccagcaggccgggagagctacataatataacataaagttcaccatttttaaagtgaacaatttggtggcattcagtacattgacaatgtcatccaaccatgacctccacttccaaaggagacctcatccccatcagtagccattccccattcccctcccccaacccctggcagccactcctctgcttcctgtccctatggatttgcctgttctgggcattttatatcagtggaatcctacaccgtgtgtccttttgtgtctggcttctctcactcagcaccgtgtttttgggggctcatcacgctgtagcatggggcagtgcttccttccttttcatggctgcattgtattccattgtgtggatgaaacatgttgtgttgacctgttcacttgttaatgggcacttgagttgcttccactttggggctattgtgaatagcgctgctgtgagtgcatgtgtctgtgtatgtgtgtgtctgtctgtgtgtctatgtgagtgtgtgtgtctgtgtgtctatgttgtgtgtctgtgtgagtgtgtctgtgtgtctgtgtatgtgtgtgtgtctgtgaatgtgtgtgtctgtgtgggtccatgtgtctgtgtgtgtacgtgtgtctgtgtgtgtgtgtacgtgtgtctgtgagtgtgtgtgtctgtgtgtgtgtgtatgtgtgtacaaggatttgtttggttcttccaacacactttttgtgttctatgaccaggagatccaagtaactcaggcccttggagggaggttctgatttactgaaaaaaaaaaaaaattccacattatactcatgacttgaaaaacattaaaagagaaccaaactggctggttgcggtggctcacacctgtaatcccagcactttgggaggcagaggtgggcagatcacttgaggtcaggagttcgagaccagcctcacaaaaccccatctctactaaaaatacaaaaattagccggtcgtggtgttgggcacctgtaatcccagctactcgggaggctgagacaggagaatcacttgaacctgggaggtggagattgcagtgaggcaatatcgcgccactgcactccagcctgggtgacagagcaagaatctatcaaaaaaagagagagaaagagagggagacccaaaccaacagttttccctcacccctcgcccctcagcccctccctatgttgcggctcaaaagccccaaacccaagccagggagtgggggaccagtgcgtgggcagacactgcatcctcaagggtgaaccatcccgggaaactgtagcccctctgatgggagggaaggagaggacaacctcagaacgtctcaaagccaggctgcttcgggtcacaggcctgagtcccaaagcaggactgagctggaggacacaaggacctccctgaagccacggggcaggcaggggcaggagacccagtttcagacccacctggaaccttgggagtggcctttagcttcccctctctgtgtggctgctgccaggctcccagcaccagacactggctcccaagtatccttctggtccctgaagttgggctgatgagagaaaaaggtgaaccctctcccctgccttttttttttttgagacggagcctcgctctgtcgcccaggctggagtgcaatggctccatcttggctcactgcaacctcagcctcccaggttcaagcaattctctgcctcagcctcctgagtagctgggattacaggcacccaccaccacgccctgctaattttttactttttgtagagatgggttctcactttgttgtccaggccaggctggtctcaaactcctgtcttccagtgatcctcctgcctcagcctctgaaagtgctggcattacaggcaggaagccactgcacccggctgaaaaacccttttagtatcagagcacaggggctgggtgcagtgacatcacacctgtaatctcagcacttcgggaggctgaggcaggagtatcgcttgagtaggagtttgagaacagcctgggcaacatagtgagacccccatctcttaaaaaaataaataaataagttaattaaccagacatagtggtgcatgcctgtagtcccagctactaggggggttgaggtgggaggatcgcttgagctgggagttggaaactgcagtgagctatggtagcacctctgcactccagcctgggcgacagagtgagaccgaccctgtttttttaaaaagagagagagagaatcacaatgtaagtgaatagtgtaatattaaatttcagcgtatccgttagataaagaagtgtgggtatgatgatttcgcagaacatagtgacaagaaatgtgtcacacttataccacattaaggatgttgaggccaggcgtggtggctcacatctgtaatcccagcactttgggaggctgaggcgggtggatcacctgaggtcaggagttcgagaccagcctggccgacatggtgaaaccccgtatctactaaaaatacaaaaattagccaggcatggtggcagatgcctgtggtcccagctacttgggaggctgaggcagaagaatagcttgaacctgagaggcagaggttgcagtgagctgagatcacgccactgcactccagcctgggcaacaagagcaagactccatctcaaaaaaaaaaaaaaaaggaagttgagttatgttactctttcatgctactttaattttgtttcacactatctgccaaaataaactctttcctataacttaagatgtgggtgtatatgtatatgtatacagatgtagatgcgtgtaatttattatatactgttaatttcactatttgggttgtaataacattattttgaaataaaaatataattgttcagattgtggggtacatctgaagcccttagtccttatcgtgtcctcttccggaagctgagatcttggtcagcaggtgcagaggaaagagccaggtttcagagccacagaatcagtttctcttggaatctcaggttccttctctgtgaaatggggatagtgacactctgactccaagcattcacacatgctgttccctcagcgtggtcatcccttccgtgtcatttgcctggagagctcctacatatcattaaaccccaactgtgatgtccctcctccaggcagctgccgcagacagatgctccaaattctctcatccccacccgccttccaaccgagccctgatcctgcaggctgtggccatctgtgtccagctctgtctccctgagactgggggctccttgaggactgggctaggggacacaaggggatggcgagtgttttataaaaatggagatgccaggctgggtgcagtggctcacgcctataatcctagcagtttgggaggccgaggtgggtggatcacctgaggtcaggagttcgagaccagcctggccatcatcgtgaaaccccgtctctactaaaaatacaaaattaaccaggtgtgatggcacatgcctgtaatcccagctactcgggaggctgagacagaagaatcgcttgaacccgggaggcagaggttgcggtgagccgagatcgcaacattgcactccagcctgggcaagaagagcaaaactccatctcgaaataaaaataaaaataaaaaataaatgaaatggagaccccagtaccccccgttgatagataagagactgagatttctagaggggctcagcttccctgggggacagctgtttagacccagagccaattttcaactcttgggcagccagactgcaagtccagtgctccttccaaaacttgtgtgtatggagaacccaccacctgtgccctgaccccctcctggttccccacagcccctgcccaggccaggacaccctgtcccctgggtgtccctgaggtcacagataaggccgctgggcccggctatcggcaggaaacatcttggcaggacaggaagcgcggcatgggtcagccgcgcctgcacccggctcagcctatcagcggccagatattttgggagccactatataaaccccaactcggctccaagctgttccccggggaagcctcaggcttcatgttctgcggcagccctgaggctgctggaacacggggcccgggaggagctcaggagctgagcgggacagagtgacaggggtggactccgtccgggcatcactgcaggccagagggtgctggctctgaatcgagctagcccctattcagtcctggtgcagacactctcacttgctgggcaagtggcttcaccgccctgtgcctcagtttccccctccccacatccctcctttgatcctgtcccagggaaaaacacacctccaggtcctggagccttttctgaagtttctgggccgacatctgagggccaacccactttctcccaatgcaaagcagggcccaggaatctgcatcttaaaacctgccttggccgggcacagtggctcacacctgtaatcccagcactttgggaggctgaggcgggtggatcatgaggtcaggcattcgagactagccttgccaggatgttgaaaccccatctctactaaaattacaaagattagccgggcatggtggctggtgcctgtaatcccagctactccggaggctgaggctggagaatcgcttgaacctaggcagcagaggttgcagtgagctgagattgcaccactgcactccagcctgggcaataagagcaagactccgtctaaacacacacacacacacacacacacacatacacacacacacacacacacacacaacagggatccatacgcaagcccaagcttctcaagttcaagaacatacggtgggtccagctcctccacccaaaaagttcagtggacaggcacccagcgtgacaccgcataactgctgaatttgagccacattataagaatgggctgtagttattcccattttacagaagaggggttgaggcccagagaggggcaggaagttgcctgaagccacacagcagcccagaggccacgccctatcagaatctccaccccgtgcacctctcaggagatgctccaggggtgatgtggccagccaacaagcagtggggttaggatttgaacccgggtctgcctgctccacgaccccttgttggcacagaacagtgccatcttgggcccagtgatgactgctctggtcctgaataacatgcatatttctcccaggaccagtaaaagtgaaacgaagaagtgaaataaaaatactcaagaactcactggggcccgcagccggctcctgacctcagagcctcggcctttcctggggagaggcaagggggcaggacggcagcgcgggcagaggaacccaagcgtggctatgtaaagtggccggcccagcacctgcgactgcctgccagggcaggtgatgaagcgtgcccggccggcccccaccccaggcagctgcagctggcaaaagggaacagccacaccacatataacctggcctgaactccacccaaaaccagagctcgaggcctggcccgtgcctggaaagccagttttggcccaatgactctgggcaggtcactgtccttctctggatctcagtctccccactggccacagaaaagtctcagcagtggcagaggctcctgcctgaccattctgaccatcccagaatggaaagggaaatcacctccctcattctggagcctatacctctaataatataacccatgggcctagcagcttgctgggcagctatgtcacaggcaatgggccccttcaggtgtccctgaagtcctcatccctgcccacctttctttaagatctggtggggactgggggtcaagatgtcttctagttcatgccacacaaccacttggctcagtttgctgccagggaggcactggactggcatctctttcctgacgacatgctcactgccagccggggcagcctagtgtgtggcttagtgaaagtgggtgcctccttcagagtggctcagtccccaccctgccctgctctgccatccagccacctgggactgctgacagagacctaagtcagtccttctctaggttaaatgccctaaagcctccagggccttctcccaggacaccacttagaagtgtgtatacacatacacacacacacaccatggtggtcttccccaaacctgccactatccatctatccccattttgaagtggcagggccccctgcctgacagcattgaccagcccagaatggagagggaaatcaccttccccattctggagtctatacctccagtaatgcaacccatgggctcagcggcttgctggacacctatgtcataggcaatgggcccgttcacgtaaccattcgtcaattccaaatattgagccccacaagggagctttgatgaaggtggtggggatggggatgtcttgtttctttttctctctcttttcttttttggtagagatgggatcttgctatgtacccaggctggacttgaactccccctggcctcaagcaatcctcctgcctcgacctcccaaaatgctaggattacaggcatgagccaccaagcccagccggagtgtcctgtttcttgagctggctgctggttacctgggcatagtccctttatgagaagttacagaactgtgtacctaggatttgggtactttaatgtctgtatgttttccttgaataaaatattttaaaagaagaaaaggaaagaaagcagtttgatgtctcggactgagaatgaaagctaagtagataataactaggtgaggtttgagggcatggatggattcgggaagggcactgcaggcaagaggcacggcgcggctaaggcctggtgtcctgaggcagccttggtgtttgagggacctggcagaggcccgtgtggctgggtgggggcagggaccagccatgcagaccctcaaaagccacagcagggtgcatggatgttaccccgagacaggtgccaagccgagaagtttaagtggaggctgatgattaagtggaatggacatgtggaagggcggttgaagccatgagcaagggcatttatgattgagtggtaaagggttgctcagcccatctgccagaggggaatactgaggcccggtgaatccaggctgcttggctacaagtaggaggtggaggggcaatgtgagcctggcccagctcgcccaagggccactttctcccagctgcacccacttggagagtggtcacaacctctgtgcccaagaatcagccagatctcccaagtttgagtctcactctgagctcactggcctcagtgtcctcacctgtcaaacgggggcctgggagggtgagtctcatcttcgacccctctgcaggcagcccagcgactctttaccacggatttcactgcgattccagccaagagtgcctgggcagtggagggggcatttcataacccgagcactgcagaggtggcttttctgagaagcccggccccaaggaggaaactctctgatcttcgaatgccgtgggggtgggggtggcaccctcagcttgcaccaggaaaaactctgggggaaggggagaaggtaggagttctaaaaagaaataactcagtaatgcaaattcagccgcattgggggaaatggaagaagtaaaaaggcactgatgagaagggactcgtgccacacgcagggcagggggttcggggacaccatctgggcagatcaccacccaggcacccttgccacagctcctggccttacctcgagcctttatccgggctgcaccttgacctggggtctccttcccctaaacctccccatagggaatctttctcttctctgacccctaaaggcgacctcataccctttcaccagtcacacccagttacactgtgtcccccagctcctggccatcactaagccaccttctgtctctacagatttgcctgttccagacacttcaggcccctcagtatcacccccactgtggtcttgtcttcaactgtggtctctccagagtcaccttggttttctgccttttgctcgtccatccccaccgctacccgtgggagggcaggacccagctggctttctccctgcttctccatccatcctacttctgactccccagcctggagcctggcaccgaaaggcgctcagtaaatatttgctggctgaatacacggggtcaggcccaccttatctttagcagggagtgttatcagcttggctcgggaccaaactccagctcagcttgggccatccctcctacaagccccagttcttctcagctaaacaacaggtctggggggtgacacttctcgccaggggtccccaaagataacccacagcacatagaaagccaggcacacctggcatggcgcagtggctcacgcctgtaatcccagcactttgggaggacggggcaggaagatcacttgagctcaggagtttgagaccagcctgaccaacatggtgaaaccctatctctactaaaaatacagaaattagctaggcgtggtgaaaggtgcctgtaattccagctactcaggaggctgaggcaggaagatcgcttgaacccgggaggcagagtttgcagtgagctgagattgcgccactgcaccccagcctgagtgacagagcgagactgtctcaaaaaaaaaaaaaaaaaaaaaaaaggccaggcacaccggagatacccagccactgtcatttcccccaggggtgtccccttgctgatccctggatggggctctgtcttcctcccccaccaggcaaagagaggataaaagtgaccagtgaggctctgaaggtgctgggttctctcccccacctccagctctttctaagaagccaatggtgataacattcccccaaaacaggaaccagcgaggggcaccctgtgttgcagaaacctcccgcagaagctgcccacccagcccccgaccccacggccggcttcagggcccgctgggcacagcctggaaagatttttatgtaaaagtggtcgatgcaaatccagaaacctggggaccatgaaaagatccacttcccctttaacccactctggcctgagttgctgccacctgggcacggctgctggacataggcctccctgacccccgctcccgtttgccaagccggcttccagcacccacagcgcttaggacttgctctgcgcaccggaggccccaaatcctggttgctgggctagaggaacagggagcaggaacggctcatgtagacccccaaaccccctgccctgaagcaggaatgatcccagcagctagatctgactttttttttttttttttaagacggagtcttgctctgtcgccagactggagtgcagtggcatgatctcggctcactgcaacctccgcctcccaggctcaagagactctcctgcctcagccttccaagtagctggcattataggtgcccccccacttcgcccggctaatttttatatttttagtagggatgggatttcaccacattggccaggctggtcttgaactcctggcctcaagtgatctgcctgcctcagactcccaaagtgctgggattacaggtgtgagccaccgtgcctggctgctagctctgacttttaaaaaaaaattgagataaaattcacacaacataaattcaccattttattttgatttttttcagacaggattttactctgtcacccaggctggagtgcagcaggttcatcatggctcagtacagacttgacctcctgtgctccagtgatcctcccacctcagcctcccgagtagctagctgggactacaggcatgcaccaccacacccagctaacttttacattttttgtagagacggggtcacactgttgcccaggctggtcttgaactcctgggctcaagcgatcctcctgcctcggcttcccaaagtgttgggaatacagacgtgagccactgcacctgggttgaatttttaaatttttattttatttatttatttattttgagacggaatttcactctccttacccaggctggagtgcaatggtgtgatctcggctcagggcagcctctgcctcccaggtttaggtgattctcctgtcttagcctcctgagtagctgggattacaggcgcctgccaccacgcccagataattttcttatttttagtagagatggggtttcaccatgttggccaggctggtctcgaactcctcacctcaggcaatgcactatctttggcctcccaaagtgctgggattacaggcatgagccaccacgcccggccaactttttaaaaaattgaaataaaattcacacaacacaaaattcaccatttgctttaaagtatatgattcagtgggtttggggcacactcatgaggttgtacaaccatcacctatacctaatttcagaacattttatcccctcaaagggaaaccccgtctccaactgagttggccacctcagaagtgactgagaagcagtcacttatccccctccccagaaccctgacaaccacaaatctgctttctgtctttggattcgcctgttttggacagccatgaagtgggcaaaataacattgagtgaaatctttgtgatggagaaaaataggtcatgacatggtaggtgggacccggagggtcattttagccgagaaggtcaaggaggttctctctgaggaggtgacatttaagctgagaccagcaggagataaaggagtggctgaagggaacagcatttgcagcagagggaacagacagtgccaagaccctgaggcaggaccatgcctggtgtgatcatggaactgtggggaggctggtgtgttggggaggctggtgtgcaggaggagatggggtcacagggtggccggggccagaccacagagccttgagggcctcagtgagaggtttgtgttttgtcttgttttgttgtttgtctgtctctgagatggagtctggctctgtcacccaggctggagtgcagtggtgcaatctcagctcactgtaacctccacctcccgggttcaagcaattctcctgcctcagcctcctgaatagctgggattacaggtgcgagccaccatgcctggctaatttttgtatttttagtaaagataaggcttcaccatgttggccaggctagtctcgaactcccagcctcaagtcatccgcccacctcgtcctcccaaagtgctgggattacaggtgtgagccactgtgcccggccaggtttgggttttatttcaaacctgggacagggctccgttctccaccactgctctaaaaatatttattgaaagaagagggacataccacagagtcagccctacctttggtgcttcaggccttcaaatggagaccccagggtgcaaggaattcaggtctttgcagaccttcctgtggaagatggaacagtgtgaaactgcatggaacagcatggatgcatttgggaactgcgtggaggctctgtctcctgtaaggcagaactgagttggccgccccagggactgagtccctggccacctcctgccagccacaaagaccgtgctgcccacgacgtgctgttgcttcatggtgacttgactgtgatacaaagaggccaccaacctggacagggaaacctgagctttctgcaagctccccagtaactccaggcctgacaggggctcacttcaatacccccagcccccgtctatgaaataaagggtgtttaggatccatctggcaacggacacccactcgcccaggccagacctagggaggggcacagggaccaacgaggcctcagtttccctatctgtgaaatggacagaaaaagccccgcggcgcatcataacaacccaccaggtctattgtccagccctgggggcccccacatccctctgagcagctttggggtccccaatttccttcccccaagcacacacgcactgtcctctgcccctgaccgcagccgggtcctgatactgttttgttctcaccctgctctcctgacctggtgccaccagtttggtgtcttaaaaaaccacaacttagggtgctgttatctgctatcagtggcgggacgcggtggtttcggggcccctccgtgcacttctcagaagagccagccatgtcatcgcagggtgcttggcacaaagcagcttgtttatcaggccccctcatcgcgatccctgctgataagggccttcaaggcgcccgacaacttgtttacgggccttgttttcagagattctccatttgatgtatcccggtcttgcagcccaggggtcagggcattggggaggggggaagcagggctgggtcgaggggcttctgggaagacttcctggaggaagggatgctggaagggagcgagggagggttagttgcagaagatggggtaggcattgcaggtggaagaacctgcatgggcagaggtttggagataagaaccttgtgacaggctgggggcaggggctcatgcctataatcccagcactttgggaggctgaggtgggaggatcgcttgagtccagaagttcaagaccagcctggccaacatggcgaaaccccatctctacaaagaaaaaaaaaaaattagccaggcagggtgcgtgcctatagtctcagctacttgggaggctgaggtgggagaattgtttgcacttgaccttgagaggtggaggttacagtgagccaggatcacaccactgcactccagcctgggtgacagagccagaccctgtctcaaaaaagtaaaaaaaaaaaaaaaaaaaaaagagcttctggcaaagtcaggttaattaatgagctggggcttatctgaagagcaatagggatttggcagggtttaagctggggagtggggaggttaagagccagggtgaagtttgaatcctggttctactcccagcttcagttttctcatctgtgaaatggggatggtgtgaggattcagtgacaccattcaggaggggacgctggggagaagccacaagcaggttggatgggaggaggagggcctggcaatgccagggaatgcgtagagccagaaagctgattagtagttgcttaaggctgggggctgggatgggaacaggatggaggttgatagctaaaggggaaggggtttccttttgaggtgattaaaatgttctcaaacaggccgggcacggtggctcacacctgtaatcccagcactttgggaggccgaggcaggtggatcacttgaggccaggagttcgagaccagcctggccaacatggctaaaccatgtctctactaaaattacaaaaattagctggacatggtggcacatgcctgtaatcccagctacttgggaggctgaggcaggaggattgcttgaacctgggaggcagaggctgcagtgggccaagattgcaccaatgcactccagcctgggcgacagagagagacaccatgccaaaaataaataaataaataaataataaaataaaatgttcccaaatggagtggtgatggttgcagaactctgtgaataccctaaaacccattgaattggaatctttgttattattattattattattattttgagacagggtctcactttgtcacccaggctgtagtgcagtggtgcaatctcagttcaccgcagtctcaaccttccaggctcaagcaatcctcccacctcagcctcctgagtagctgggactacaggggtgcaccaccatgtctggctaattttcttgcttgcttgcttgcttgcttttttttttttttttttatagagatggggtctcactgtgttgcccaggctggtcttgaactcctggcctcaagggatcctcccgcctcaacctcccaaagtgctgggattacaggcatgagccaccacgcccggctgagctggacactttaaatgagtgaattgtgtggtcgatgcattatatctcaacaaaactgttaaaaaacaaaacagacaaaagaagatcaagaaggcctttttcactttagcaccgggaaacccaggaggcagctctgaacctctggatagaaggcattttgggcagcggctgaaggaggtaggtactgagctccttgtcacctaagccatgaccaggtgagctcctgctgggagccgcaaccacccagctgctcctccgcttctcccagcaggaaaggtgccaggggctgcccctcagatgtggcaacaggagctgggccccccacccgcccacactggggtttctgcgcctttgctacctgtctacctgctaagccacttcctccgcccacccaccagcccgtctgcctggcgcctggcttccccggctccctcgtccgccttgcctgcatccccctacccacctggcttcctcgtgagctgcccatgtaggcaggactgggagaggaccctcctccaaaagccaggatcggagcccagcttagccattgactctctggagctccttcaagaagtgagccttagtttatccgcctgagcaatgggactaaaaatatcaacctcgcaggatggctgcgaggctcagggcctttgcactgtccatcccccccccctgctgggggcaccttctagaatcttcctggaggttgccactggcctctctctcctcctgggaaaaaccctccctgactcccccagctaaatgcaccaatgggccctcttttcccctcgcctcaattcattttttgccctggaacctcagtacctagagctttatttatttgtttattatttttatttttattattattttttgagacagtcttactctgttgcccaggctgaaatgcagtggcgtgatctcggctcactgcaatctctgcctcccgggttcaagtgattctcctgcctcaggagaatcccaagtggctgggattacaggcgcccgccaccacgcccagctaattcttgtatttttagtagagacgaggtttcaccatgttggctagcctggtcttgaactcctgacctcaggtgatccacatgcctcggcctcccaaagtcctgggattacaggcgtgagccaccatgtccagccaataagcagtcccagagctctattgatgactgtttgccagtctactgcttgcatctaacctgagagctacatgaggacagagactgtgcctgtctcaggggcacaggagtggctcagggactgttttgttttgttttgttttgttttgagacagagtttcgctcttattgcccaggctggagtgcaatggcgtaactcggctcactgccacctccctgtctaaggttcaagcgattctgctgcctcagcctcccgagtagctgggattataggcacccaccaccacgcccagctaattttgtatatttagtagagacggggtttctccatgttggtcaggctgttctcgaactcccgacctcaggtgatctgcccgccttggcctcccaaagtgctgggattacaggcgtgagccactgcacccagctgggacaatttgttcaatagtgagcaaagtgtgtctggggaattgtgtgccaggttcagagggagagctgggagcagcagcacacacctgtagtcccagctactcgggaggccaaggcaagaagatcgcttgaggctgagagtttgaatccagcctgggcagcatagggagacctcatctctttttttttttttttttttttttttttttgagacagagtcctgctctgtcccccaagctggagtgcacaatctcagctcactgcaacctccacctctcaggttcaagcgattctcctgcctcagcctcccaagtagctgggattgcaggcatacgctaccatgcctgggcaatttttgtatttttagtagagacggggtttcaccatgttggtcaggctggtctcgaactcctgacctcaaattatccacccacctcagcctcccaaagtgctgggattacaggagtgagccaccgcgcccagccaagaccacatctcttaaaaaacaaaggcctaggccaggtgcagtggtgcatgcctgcaatcccagcactttgggaggcccaggcaggaggatcgcttgagttctggagttccagaccagcctgtgcaacatggcaaaaacccctctctacaaaaaatacaaaaattagctggacgtggtggtgtgtgcctatagtcccagctactcagtaggctgaggcaggaggatcacttgagcctgagagcttgaatctggcctgggcagcagagtgagaccccatctcttaaaaaaagaaaaaaaaggcctggtgcagtggtacaagatcacatctgtaatctcaccactttagaaggccaggagcttgagaccagcttgggcaacatagaaagacctcgtctctacaaaacataaaaagaaattagccaggcgtggtggcgcgtgcctgtagtcccagctacttgggaggctgagatgtgaggatcgtttgagcctaggaagttgaggctgcagtgagccgtgattgggctgctgcactccaacccaggcagtgtagagatcctatctcaaaacaaaacaaaaacaaaaaaggaaagattgcatgtggtcttatagcaaagctgacaagaaaacgttcaggaagagaaggaaaatttcttgtgagctttcaaaatacaccctgaaacctcaaataaattctctgcttggggagagatctagacacctcccactttcctttctttttttttttttttttttttgagatggagtctcacccagtctcactccagtcgtgcccagtctcactccagtctcacccaggctggagtactggagactggagtgtagtggtgcgatctcggctcaccacaacctccacctcactggttcaagcgattctcctgcctcagcctccccagtagctaggactacaggcgcataccgccatgctgggctaatttttgtatttttagtagagacagggtttcactatgttggtcaggcttgtctcgaactcctgaccttgtgatctgcccgccttggcctcccaaagtgctgggattacaggtgtgagccaccgtgcccggctattttttttttttttttgagacaacgtctcgctctgtcacccgggctggattgcagtggcacgatctcggctcactgcaacttccacctccgggttcaagcgattcttgtgtctcagcctcctgagtagctgggattataggtagctgccaccacgtctggctgatttttttatttttagtagagacagggtttcgtcatgctggccaggctggtctcgaactcctgacctcaggtgatctgcccacctcagcctctcaaactgctgggatgacaggcgtgaaccaccatgctggcccttcattcctttttaaggctgaataatattcccttgcacggatgggccatgttttgctggtccattcaccctttaatagacatctgcattgctcccactttttggctattgtgaataatgctgctatgaatattcatgtccagggatttatttgaacacctgtttccactcttctggggatatacctaggagtggaattgctgggccatatttatggcaattctgtgtttaacttttttttttttttgagacaaggtctcactctattgcccaggctgaagtgcagtggctcaatcacagctcaccatggcctcaacctcctgggttcagctgatcctactccctcagcctcccaagtagctgggaatacaggtgcatcacctcgcctggctaatttttttatgcttttcatagagacagggtttcaccatgttgcccatgctggtctcgaactcctaagctcaagcaatcctcctgcctcaacctcctgaagtgctaggattacaggtgtgagccactgcacccagcctgtgtttaactttttgaggacctaccaggcttcaacgacagcatcatttgacattcccaccagcaatggctcagtagttttgaacccttatggctttcaactaactaggacccaagttcaaatcttggcttaaccactgtgaccactggatccttttctttcccatcatgcatcttgcttttcctggtagcaacacccaattctgcctctaggaacccacctgtctcagcatggccagcggggctatcaatcctagaggttcacactcaatgggctgggggcaaatttggggaaccaagaggtgactcccctacctaggaaaattcacaagaacaaggcaggtctaattgagattcacatagggggaggagagagaaggcggccttggcagctgctagggcctcctgagccagcaagattttaaatatgtttttgcacaaaaatagacggatagaccttcaaacaagaagaaaaaagaacctgtgtttagagctgcgagctgagtgtttaggcagctgacagcatttagcctggaacgaactatccaatgcaagtgtgtggttagggtcgtgttcaaaaatacggcttcgaagcagcaaacccggggctgggccactcgccctgtaattctttttccaaataaaaggcagaactattcctggctcggcttggggacttctgcggctgccggggctccaaggaggccagcctggaatgtcaagcatggctctcgccccgccaggctcaggcctatgctgcttgggagcctgtcattgtatgactttttaattaaaacgtgattcccacagggccctgtccgagcccaggactccttcacaggaggcccctgggcttgtggcaaagcgctgggacttgtgatgtttggtagcatgagccaatttggagctatttgtggagtggatttaaaaaaaacaacaacaaaccaaacaaacatcacttgatgtttgccaaatatagcattttgcatttctataagcaaagccctaattttttttttttttttgagacggagtctctctattgtcacccaggctggagtgcaacggcgcaatctcagctcactgcaacctccgcctcccaagttcaagcgattctcctgccccagcctcccaagtagctgggattacaggcgcccaccaccactcctggctaattttttgtatttttagtagagacagggtttcaccatgttggtcgggctggtctcgaactcctgacctcaggtgatccacccgcctcggccttccaaagtgctgagattacaggcactgtgggccaccatgcccagcctgatttttttttttttttaagagacagagggagagctctgttgcttaggctggagtacagtggcacgatcatggctcaccacagcctccaactcctgggcttgagtgatcctcctacctcagcctcctaagtagctgggactacaggcatgcaccaccacatttggctaattttattttttattttttgtcgagatgggggtcttgctgtgtttgcccaggctggtctccaactcctgacctcaaggcatcctcctgcctcagcctcccaaagtgctaggattacaggcgtgagccaccgcacccagcctaaagccttgatttttaaaaagtaatgtacttggccaggcgcggtggctcacgcctgtaatcccagcagtttgtgaggcagaggtgggtggatcacgaggtcaagaagtcaagaccatccttgccaacagggtgaaaccccacctctactaaaaatacaaaaatcagccgggcgtggtggcgctcgcctgtagtcccagctactcaggaggctgaggcaggagaatcgcttgaacctgggaggcagaggttgcagtgagccaagattttgccactgcactccagcctggagacagagtgagactctgtcccaaaaacaaacaaaaaaagtaatgtacttaatcagatatagaaaggaaagaagcactgatccattctacaaggaggatgagctcgaaaacataacgccaaatgagagaagccagacaccaaggccgcgtagtgtgagattccattgatatgaaatgcccagaacaggcaaatccacagagacagaaagaggaagaagaggaagcatggttgccaccggctgtgggggagtggggagtgattgctgatggggacaaggcctgcttttggcagggatgaaagtattttggaattagatagaggtggtggttacacaatattctgagtgtactaaatacctctgaattactcactttatttatttttgtttttatttttattttattttttgggacagagtcttgctcttgtcgcctaggctggagtgcaatgatgcagtctcggctcactgcaacctctgcctcccaggttcaagtgattctcctgcctcagcctcccgagtagctgagattacaggcacccgccaccacacccggctaattttttgtatttttagtagagacagggtttcaccacattggccaggctggtctcgaactcctgacctcaggtgatctgcctgcctcggggcagattctaaagtgctgggattacaggcgtgagccactgtgcacagcctgctgactttaaaatgggtaattttatattgtatgaatttcttaaaaaaaaaaaaagccaggcacggtggctcatgactgtcatcccagcactttgggaggccgaggtgggaggatcacaaggtcaggagtttgagaccagcctggccaacatgatgaaaccccgtctctactaaaaatgcaaaaattagccgggcatcgtggcaggtgcctgtagtcccagctactcgggaggctgaggcagaagaatcgcttgaacctgggaggcagaggttgcagtaagccgagattgtaccactgcactccagcctgggcaacagagcgatactccatctcaaaaaaaaagaaaagaaaacaaaacaaaacaaaaacggcatgtaacttggggagtggtaagaacagaggctctgggtctaaatcctccctggcctgccagtgaccagctggtgggcttaaagcaacaatttagcattctcagatctgaatctgccatctgtaggcagaatggggatactgaggctgggcctcaggaagaccaccgccatctgccacccagctcactatagtcaaatttccccagcttccccagtaacaacctttatggccactttttcctttttcacttaggatccgatccagactcacacattgcccctggggcttctgtttcgttcactacctttcatcaggaaccatgctgcagtctttcccagcctttcacgacatggacattttggtggagttgaagtcagttgttttgtggaacatatcccagggtgctggcctgatggttccctgtgaccaggtagagggtgtgaatttggggcaggatccacagaagcaatagtggatcttccctggtgcgtcgtatcgggaggcacctgacattggcttgtccagttactggggatgttaactgtagtcttatttttttctttttctttttctttctttctttctttctttctttctttttttttttttttttttttttttgagatggagtctcattctgtcacccaggctggagtgcagtggcacaatctgggctcactgcaaactccacctcctgggttcaagtgattctcctgcctcagtctcccgagtagctgggattacagctgcctgccaccacgcctggctaatttttttatttttagtagagacggggtttcaccatgttggccaggctggtcttaagctcctgaccacccacctcagcctcccaaagtgctgggattacaggcaggagccaccatgcccagtctctctctctctctctctctttttttttttagagacagtcttgctgtgtcacccaggatggagtgcagtgacacaaacatagctcaccttagtctccaggtcctgggctcaagtgatccttctgcctcagcctcccaagtagctgaactacaggtgtgcaccaccatgccctgctaatttaaaaaatatgtatttctttgtaaagaaagggggtctcactgtgttgcccagtttggtctcaaactcctagcctcaagaaatcctcctgcctcggcccctcaaagtgctgggattacgggtgtgagccactgcgcccggccaaatgtgctcttatgattcaggcgatgggattatatgtcttaaaatcttcccagagcagggaccccaatgtgcaggaggagctagaaatgactcccttaaatctcttatctgcagagccccgctggccccagcctccattctgtctcagggctccctcactgccatgtcttttccttttttctttcaaaaaaacatctgcaagtaagcccaatgtctgatcgggccaggtgacacggagccagcagggccagggatggcttagacccttttctgagccagaagaggggaccatgtgagggcagatgagatgcattcccagagacttcctggaggagatggcctctgagccacatcctagaaatgagctgcaccttagtgccatttcaagggttctggggctcccggagaagtctccaggggcctttttctgtctcacccagtaggacagcccaggggttcactggtcccctgtcaggggctcatctggactttcgccatcagatgttagtggcagtttccccatgcggtggggaagcacattcatgcccccatcatcagggaacagaccactctgccttctttgaagtttacgatctacaggcaactggatttgaatctctgattttatccctgcctctctggaggctgaaccacaggcctctgtgttcagtccctgcctgggagctattttgggatctcaggtctgtaatttttgctgctcggggaaagccttggcaggaatatggggggcagagaacggagggacagatggctggcttccctcaccaagcctcagtttacccatctgctaacgggggtgagtaattcacacctcacgggagggcggtgaaaaatctgttcaatgctgggtatgaaatgacatcctggagacagcctccatcagggtttctttgtttctctgttttgaaacagggtctcactttgtcacccaggctggagtgcagtggtgctgattcatggctcactgaagcctccatctcccgggctcaagtgatcctcccacctcagcgtcccaagtagctgggaacacaggttcatgctgccacacctggctaatttgttttttatttcatttcatttcattttatttttttgagacagagtctttgctctgtcgcccaggctggagtgcagtggcatgatctctgctcactgcaacctccgcctcccgggctcaagcaattatcctgcctcagcctccctagtggctgggattacaggcgcctgccaccacgcctggctaatttttgtattcttagtagagacggggtttcaccgtgttggccaggctggtctcaaactcttgacctcgtgatctgcccacctcggcctcccaaagtgctgggattacaggcgtgagccatcatgcccagcccacctggctaatttatttttaatattttcatagagacagggtctcaatatgttgcccaggctggtctccaactccttggttaaagcagtcctcccaactcggcctgccaaagtggtgagatggcaggagtgagcttctgcacctgggcacactcagggttttgtctattcttgtgtggagggggatgtctgctcctttttttttttttttatggaggctcgctctgtcgcccaggctggagtgcagtggcacaatcttggctcactgcaagctctgcctcccgggttcatgccactctcctgcctcagcctctcgagtagctgggactacaggcgcccgccactatgcatggctaattttttgtattctttagtagagtcgaggtttcaccatgttagccaggatggtcttgatctcctgacctcgtgatccacccgcctcggcctcccaaagtgctgggattacaggcgtgagccaccgcgcccagcctttattttttactttttttaattactattttttttgagatggagtttcactctatcactcaggctggagtgcaacggcgcaatcttggctcactgcaacctctacctacttcccgggttcaagtgattctcctgcctcagcctcctgagtagctgggactacatgtgcgcaccactatgcccagctaattttgtttgtgtgtgtgtgtgtgtgtgtgtgtgtgtgtttagtagacacggggtttcaccatgttagccaggatggtcttgatctcctgacctcatgattgcctgcctcggcctcccaaagtgctgggattacaggcgtgaaccaccacatccaggtaatttttgtattttcagtagagacagggtttcaccatgttggccaggttggccttgaactcctaacctcaggtgatccgcccaccttggcctcccaaagtactgggattacaggcacccaaagtgctgcacccggcctctgctccctcctctacctcccatcaaaaataggcaagtgagattggtcaactggggggtaattttaactgctgacaccaggcaatgtctggagacatttttggttgttgtagaaaatctggggaggggatgttactggcatctggtgggtggaggccagggatgctgctctgcagcctactgggcgcaggatggccccacaaagagaataatccagccccgaatgtcagtggtgctgaggataggaagttacagcacccaatactgtatttcccatgtatccagatgactcatggttggtgactttgtaatttgatttgatgtgatttgtatatgagtcaatgttacacgctgctactgtttgaatgtttgtccactccaaaagtcaaggagggctgggcacggtgactcatgcctgtaatcccagcactttgggaggccgaggcaggcaaatcatctgagctcaggagtttgagatcagcctgggcaacatggtgagatccccatctctactaaaaaacacaaaaaattagccgggcatggtagcgtgtgcctataatcccagctactcaggaggctgaggcaggagaatcacttgaacccgggaggcagaaattgcagtgagccaggctcatgccacggcactcgagcctggggaacggagagagactctgcctcaaaaaaaaaagaaaaaaaaatgctgggcacgatggctcatgcctgtaatcccagcactttgggaggccaaggtggacagaacaccaggtcaggagatcgagaccagcctggccaatgtggtgaaatcccgtctctactaaaaatacaaaaattagctgggtgtggtggcaggtgcctgtaatcctagctactcagaggatgaggcaggaaaatcgcttgaacccaggagacggaggttgtagtgagccgagatcgcgccactgcactccagcctggcgacagagcgagactccatcagaaagaaagaaagagagaaagaaagagaaagaaagagagaaagaaagaaagagaaagacagagagaaagaaagaaaaagaaagagaaagaaagaaagagaaagaagggaaggaagaaagaaaagagagacttaatcctcaatgtggcagcattgagaagtgagacctttaaaatcatgattagattagattatgattagattatgttatgactggggccaggctcggtggctcatgcctgtaatcccagcactttgggaagccaaagcgagtggatcccttgagcccaggagttcaagaccagcctgggcaacatagtgagactctgtctctgaaaaaaaaaaattaagaaagaaagagttgaaagaagaagaaagatctgagatagcaagttagcatgcccagactcctctccagaaagtccccaccaggaggaagactctcaccagaactgtcccttgaccttggacttccctgcttccagaaattaacaaatacattttgtttctttacaaatcacccatcttcaaggccaggcactgtggctcatgcctgtaatcccagcactttgggaagtggagacggatggatcacttgaggtcaggagatcgaaaccagcctgaccaacgtagtgaaaccctgtctctactaaaaatacaaaattagctggacgtggtggcgcatgcctgtaatcccagctactctggaggctgaggcaagagaatggcttgaaccggggagacggaggttgcagtaagctgagattgcactattgcactccagcctgggcaacaagagcaaaactccgtctcaaaaaataaaattattaatattaattaaattaattaatttattaaatattaagctgcttttataaaaacaaggtgagtactgccctggttctcacaatgtctgggatatttttggttgtcatggatgggtgcagtggggagggaggcatgtatccctactgacatgtggctcagaaatcttgaactaagagaagcatcttccaagggtggcctctctgcagttgtgacatctgagctgggatctgaacgtgccaccccgagtaaagtttgcaggcccagcgtgggggttcagtggacacacacatgtgagtccagaaagacccagtgggtctgaggaacagtgacaataggcccctgggctggggccgagggaaaggagtgacagaaggtgatgtcccagaggccatatcctgaggcctctccctcgatcccgtgatgtttcagaaggtccctctggctgacgggtggagaatgagctgttgggccaggggagaaagtagatggctcgggttgattccccgggcaagatgaaggtggctcggcagagttggagggggctggtgaaacgaggaggaattgcaggctgggcaaagtgttcctgcaaagagcgggctttgcaagccataaggtctgtgttgcaaccactgaactctgcctttgtgtccccaaagcagccttaagatgagatgtgacaaatgggcacaggcatgtgccattaactttatttatggacaccaaaatttgaatttcctagagctttcacatgtcacaaaatatttttcttttaatattctcccaaattttataaaatgtaaaaaggccagcccaggcaacatagggagaccccatctctatgaaaagaaaaagaattaggcagtcatggtggtgcacacctgtggtcccagctactcgggaggctgaggcaggagggtggcttgggcccaggaggttgaggctgtagtgaactatgattgtgccactgcactccagcctagatgacaaagagagacgccatctatttttttaaatggttaaaatggtcaattttctgttatgtgtatacatatatatatgtgtgtgtgtgtttgtgtgtgtatctgtgtatatatgtgtgtgtgtatgtgtgtgtgtatgtgtgtgtgtgtgtgtgtatgtgtgtgtgtgtatatatatacttttttttttgagtctgagtctttgtcacccaggctggagtgcagtggcgcaatctcagctcactgcaactctgcctcccggcttcaagtgatactactgcctcaacctcccgagtagctgggattacagacacctgccaccacacccagctaatttttgtatttttagtagaaacagagtttcatcgtgttgtccaggctggtcttgaactcctggcctcaaatgatccgctcgtctcagcctcccaaagtgctggaattgcaggtgtgagccactgtgccctgtctgttatgtatattttatcacagttttaaaagataaataaaacattccgagcttgaaagccgaaacacaggtggtgggctagatgggaccttggggtcatcatctgctaatcacagagcaacccaaacaggttggcacttggaccaaaagtgtgtgagacccagaccgagggccgggtggaacccagaatcacaggggatttgctaataaggcaaatctgggtgaggacgcacctgctccaggaagggaggtggggttgctctagcgacgatgagcctggggtctaggtggcagcagcaggccaagtgccaggcgccccagggatggggaaggattgattgaataaatgtttaaaggaacgaatgagtggatgcacaggtggatggggaggggttgtgctgtaaccaccatgaaacaaactccacactttgatgagccacgtggagagggagtgggcagaaagaagaaactggaagttgggccgggtgcggtggcttatgcctgtaatcccagcactttgggaggccgaggcaggtggatcacctgaggtcaggagttccagatcagcctggccaacatggtgaaaccctgtctgtactaaaaataggaaaattagttgggcatggtggcacatggtgcagggctgaggcaggaggatcgcttgaaccccagaggtcaaggctgcagtgagccgagatcgtgccattgcactgcagcctaggcaagaagagtgaaactctgtctcaaaaaaaaaaaaaaagaaagaaaagaaaaaagaaattaaaaaaaaaaagaaaatattacctagagtaaaagaaaccagacataaaaggccacatattgtacaatcctatctatgtgagatgcccacagaggcaaatccatagggccagaaaacagattggtgtttgccagggactgggggtggagaaatgggaagtgactggtaatggggacagggtatccctttaaggtgatgaaaatattctggaactaagtagaggtggcggttgcacaacactgcatgtataaaatgccactactttaaaaatggttaatttcatgtgaattgcactttaataaaaataaacaagtatttaaaaatccaccaatgcaaacacttctctgttcctctgtggtggaggaagggacacgcgcttttttttccgaccttaggaaggaacaagggagccggggtcccctcccagcctgggagccctgggcacagtcccggctcatttgtcagagctatcggagccgtcctcgggctggtgggagttcagggctctgaaaggttttctgtcaaggcttgaaagggggccaggtttttttccccccggagccgcgcagtctcggggctgttgttctcagcaatcgcagggcctcgtgttagcaggaagcacagccaagtagggtttcctgcgtgttggagagaggaagctccgtaatgttctgggaggcgatggttaaaaataactccggtatataaagacagcggagggtccccttgttcgctcactcgggcgccggccggctggacgcagggccgagcaggtggtttggggcctcgggaaggccaaacccccgcctctgggcccctggctggggaagacaccagccaagttcagagccccaagtcggcctcacttccacaactcagcgtcagggacaccgtgggcgtttctgtttcaaaacgcttttctccagcaaagaacgtaacctcaagctgctgtcagggtagaggaatccctgccccccgccgccacccagataggttgggccgtgattttggctgtgcctggcagtgacgatgtagcgcacccaggctggggggcgctggcagccagggttcaaatcccggctctgccacctaacgctgggactcagtttctccatctgtagaatggaactaacaatagctcctatgctgttgtaagcactaaacacagaagttaagctttgggagttaggagggtgtgacctgggaaatggatgtctgccctttcataagcagattttgttttgttttgttttgttttgttttgagacagggtctcactctgtcacccaggctggagtgcagtggcaagatcacggctctctgcagcctcaacctcccaggctcaagtgatcctccctcctcagcctcccaagtatctgggaccacagatgcacgccaccacgcctggctagttttcttttgaatttcagttaagacaaggtatcactatattgccctggctggtctcgaactcctgggctcaagagatccccccatctcggcctcccaaagtcctgggattacagacatgagccactgcgcctggccacaagcagatttttagagttgtcattgccatcggaacagctgcccagacagcaagaagagcaaaagcctgtgtctggggtcaatgccagggtttgaggcttccaagcctaggtgaccccacaacagattcaacacatacaaaaaggatcacaaggacatgttataaacatctcgatgccaaaatattcagtgacagggatgaaatggacacattccttgaaagacacaaattaccaaagcttacttaagaacaaatagatcggccgggcgcgatggctcgtgctgtaatcccagcactttgggaggccgaggcaggcggatcacctgaggtcaggagtttgagaccaggctggccaacatggtgaaaccccgtctttactaaacaacaaaaattagctggccatggtggcggccactgtaatcccagctactcaggaggctgcggcaggagaattgcttgaaccccggaggtggaggttgcagtgagctgagatcgtgccattgtactccagcctggacaacagagtgagactctgtctcaaaaaaacagaaaagaaagaagaagaaagagaaggggaaggggaagaagaggaggaataagaggaagaagaaagagaaggggaaggggaggaagaggaggaataagaggaagaagaaagtagaaagaagaagaggaggaggaagaaggaggaggaggaggaggaagaaggaggagaaggaggaggaggagaaatagatcacccgaatatccctgtgtctatgggataaatcaacattgttgtaaaaagaacttcctacaggccaggcattgtggtgggtgcctgtaatcccagcactttgagagcccaaggcaggaggatcacatgaggccaggagttcaagactagcctaggcaacatagcaagatcccatctctacaaaaaatataaaaattagctgggcttggtggcttgtgcctataatctcagcactttgggagactgaggtaggagactcacttaacctcgggagtttgagaccagcctgggcaacacagtgagaccccatctctacaaaaacattttaaaattagccagacatggtgggtttcaatggtggctttcacttcatagggggcttttgttccaaagtcgcaggaggtggaattccatcaaccagtcccagctacttgggaggctgaggtgggaggattacttgagcctaggaggtcaaggctgcagtgagctatgattgtgccactgcactccagcctgggcgacagagtgaaaccctgtctctaaacaaacaaaagcctttctacaaagaaaactccaggtctggatggcgtccctggtaaatttcccctaaacatctaaggaagagagagcatcactttgataggttggtgcaaacgtaattgcggtttttgccatgacttttaagcaattacgtttgcaccaaccttacacaagggctttcaccaaactgaacaggaaagaaagcttcccgactggctttataccaggggctgctccaggcatgctggggactgtcctaggtgccgatggctggcttcctgctgttcacaggggcgctggggctccctgccccccaaaacaagatcctgttcccttccagggaggcgtgttcttctgccgttagggcagagccccggtggggctcagggaaatgaaagacatatttgctctccagaaatctgagcccgcagtgccagctcccctgaagggcgcctttgtacgctgcttgttgccacaattagcgccgtcccagactgcggcctgcagatcgaggccgccttggctccgaagcccctttcaggagtcatcagcgtcctccatgggctctgacgtgggctatttttaactggccaaaggggagttgttatgggccagcagcagcgggggacttgaggggagagaggatggcgggtgttggagaggccaagggctgtggccggtggttagggtctctgcggggagcagtgtctgcagccctgggccatggggtgtggaggcagggacctcgggcctcggtttcctcatctgtccaatggtggctttcacttcatagggggcttttgttccaaagtcgcaggagctggaattccatcaaccagtcccagggtcctgccctgcctgcctctctccatcctgttctctgtccctccctctctctgtgtgtctctctgtgtgggggggtctcactctctctctctgggtctctctctctctctctgagtctctctctccctctctctctgtctctctgggtctgtgactcttttctgtctctctgtctctctatgtgtttctctctctgtctctgactttcttcttctctgtctctctgggtctgtgactcttttctgtctctctgtctctctctgtgtgtgtttctctctctgtctctgactttcttcttctctgtctctctgtgtgtctctgtatctgtctctctcatgtgagtctctccggcatgagtctctcccccttctctctctgtgtctgactctcttccctcgtctctctgtctctacccctctttctccatctcttgctctttctctctgtgtctccgtttctctctatatatctctctccctctctttccttgtctctgtctctccctctctgtctctctttatctcctctatctctgactctctctctgaccctccacgtctctcccagggtatacattgtgtttccgcagctgtgcctgggcagggcgagcaccccataccccaagaacaagaagggtggccctacggcctccattcctttcatggggaaaagactgcggactgagtggctgcccgtcccacagtcgaccctccaactccaaggcacgctgtgtgttcagagccgcccctcggtctccatgtcccagcagggagaccctgacttctggtctcattcaaagcttttagaagaaggctgtgcactctttgcaactagattttcttaattaaataaatagatgtccggacctctctgggaagggacttggagctcctgccaagctgtcctgggtgaccatgaactcccagggggttggtctcaataaagagcagcccacggccaatagcacacctgctgatgctctggggacatccctgtgctaagggaaggcactgcccctaccccaccttacggaggaacgcaggcttagagaggggcagtcttgcaaccaggccaacaggggaggctgcctgaacctggcctttttttttttttttttttggagacagagcctcactctgtcacccaggctggagtccagtggtgcaatctcggctcactgcaacctctccctcccaggttcaagcaattctgctgcctcagcctcccgaggagctgggactacaggcacatgccaccatgcccagctaatttttatatttttagtagagacgagatttcaccatgttggccaagctagtctcaaactcctgacctcaagtgatccacctgccttggcctcccaaagtgctgggattacaggtgtgagccaccatgcctgaccttttttaaattgtggtaaaatacatgtaacataaagtttatccatcgtaaggtgtgcaatatggtggcattcagcacgttcacaaggttgttcaaccaccactagtatctacttcagaacattccatcagtccaaaaagaaaccctgtcccagcggggcacggtggctcacgcctgtaatcctagcactttgagaggccgaggcgggtggatcacgaggtcaggagtttgagaccagcctgaccaacatggtgaaaccctgtctctcctaaaaatacaaaaaaattagccgggtttggtgacaggtgcctgtaatcccagctgctcaggaagctgaggcaggagaatctcttgaactcaggagacgaaggctgcagtgagccgagatcgcgccactgcattccagcctgggcaacagagggagactctgtctcaaaaaaaagaaaaaagaaaagccctgtccccgtcagcagtcactccccatttcccttcccccaccccaggcagccactaatctgcttcctgtctctacggatttgcctgttcagggcatttcatatcaatgaaatcatacaccatgtggccttttgtgtctggcttctctcactcagcatatttttggagttcatccacgttgtagcatggagcagtgcttcattccttttcacagctgcgtaatattccattgctggatggaccacgttttgtttatctgttcattcgttgacagacacccaagttgcttccaccttttggccgttgtgaacagtgctgctgtgaacatgcatgcacacatctttgtgtgaacacccaccttcaattcttttggggatattccccaagaatacaccaacgaataccaaaatccttttgagtatatgagttaccacttcagggtggagctgctatggtatatggtaatttttttattttatttatttatttttgagatggagtcttactctgttgcccaggctggagtgcagtagtgcaatcttggctcactgcaacctctgcctcccgggttcaagcaattctcctgcctcagcctcccgagtagctgggacttacaggtgcacactatcacatccagctagttttcttgtatttttaggagagatggaatttcattgtgttgtccaggctggtcttgaactctttacctcaagcgatccgactgcctcagcctcccaaagtgctgagattacaggcgcgagccaccgcacccggccatgatatgttataaggtaattctatgttgcacttttttcttttttattgagacagggtcttgctctgtcacccatgctggagcgcagtggtgcaatcatggctcactgcagcttcaacctcctgggttcaagccatcttcccgcctcagcctcccaagtagctgggacaacaggtgcatgccaccactcctggctaatttttttattctatgtttcactttttgaggaaccctcctgattttggccctggcagaattaaggctgaattatccacactccctcggacgcacctgctgtccacagctcccccaactccctgatggcggcccccaggaacaatcctcaaactgcaccagctctttcagctctcaccttccttatctgtacatcagccgtggtgacaatgtaaggagatgatgtcagaaaaggccccagctgtggcctggcagctcaaatgaaaatcattgttcccctaccccacccccaacccaggtagggttgacagattaaacacaggacgccctactcaaatgcgaacatcagataaacaatgaattcttttttttagtataagtatatcccattccatgcactattcgagatatacttctactaaaaaaaaaacttgttgtttatctgaaattccaatttaatggagtgtcctgcgttttacttgcaaaacctggtaagcagcctttgtaacagttggttctcacagacaggcagaaattgaaggggatgctaggttttctgtttgtttgtttgtttcttttgacacagagtcttgctctgtcgcccaggctggagtgcagtggtgcgatcttggctcactgcaacctccgcctcctgggttcaagcgattctcctgcctcagcctcccaagtagctggaactccaggcatgtgtcaccatgcctggctaattttttgtatttttagtagagacggggtttcaccatgttagccaggaaggtcttgatctcctgacctcgtgatccccccacctcagcctcctaaaatgctggcattacaggtgtgagccaccacgcccggctgatgctaggtatttcagaccccaagtcacccatccacccatccagcctgtcacccaggctggagtgcaatggtggtgatctggactcactgcagcctcgacctcctgggttcaagccatcctcccacctcagcctcccaggtagctggaaccacaggtgcatgctcttatgcctggctaatttttgtatttttttgtagagatgagctcttgctatgttgcccacctgctgggactcaatccaccaagtagatgtctccaattctccaccattccccaagacaagtctggtgacaaagaattggttcagaacctgggaagtctttgaaggtccacttttgtcagatgacacatgatctaaattggtccccaaccccaggccgccggaaaggctagtgagcatggggtgagcatagaatcaccgctctatgaaaacatgcctccctcagccctgcctcctgggccaccgaggtctgattcacgcttcctcgtattcaaacagagtcggtgcagctggaagcaaccctgccaggggtaagtcagccagtgcaggtaacatttctccccctcgatttttcccagaacccggctccgggcccaacacaggatgcctgggggatgtcagaggattctaagtgaggaaacccctgccgtccattgctgttctgttcccccagggacgctttgtccagggcccaccgatccatcacacatacaaggcccagggccctggaatgtttaagagcccacaaaaaaatagcctttttttttttttttgagacagagtctcactctgtcgcccaggctggagggtagtggtgcaatcttggctcactgcaacctccacctcccgggttcaggcgattctcctacctcagcctcccaagtagctgtgattacaggcacgtgccaccacacccagctaatttttatatttttagtaaagatagggtttcaccatgttggccaggctggtctcgaacatctgagctcaggtgatctgcccgccttggcctcccaaagtgctgggattacaggcataagccaccacgtccggccacactgtatgtttttgaatgttaggagggacagaggatcccatatccagcatgtaccgggagatacaacccatttctcagatgacaaaactgaggctgagaaaagagaaacaacttgaccgagctctaggctattgttctctaaaaaacttttgtggggacagtgatttttttttttaagagacagggtctcattctgttgcccaggctggagtacaatgatgcaattgtagctcactgcagcctcgaacttctgggctcacgtgatcttccgccttcagcctcctgagtagctgggattacaggtgcatgccaccatacttagccacttagctttttttttttaattttatttttattttttatttttgtagagatgggatcctgctatgttgcccaggctgaccttgaactcctggtctcaagtaatcctctcatctcagcctcccaaagtgctgggagtgcagacatgagcccccgttcccagcttgattttgtatctttttgatgctctgggctctgtggggtgtaagctatagatacttttctttgtagataaagtgcctgcaacttacatttagtttcagggggtccatgaacccctctgaagctcacacaggggaacaatcctgggtccagatcaaagcctgtgaaatcagtttaaatcgtggctcagccaaggatcaaccgtgcctcagttttcctcctccagcacatcactatagagtggtggaaatattactggctctccgagtcccaaaaactaaggaggatccatgcagggcctggcatatactgggttttcaataaacagttttcttctcccctgtcagcctgatgctccacaaactctcaaacacacacacacacacacacacacacgtgtgagcatgagcctgaaaaaacacagctggccatttcattgatagattgacttttgttattattatctttagtagagacaaattctcactatgttgcccaggctggtcttgaacccctgggctcaagcaatcctcctgcctcggcctcccaaagtgctgggattacaggtgtgagccaccgcgcctggccaagctggccattttatttatttatttatttatttgttgttattattattattattattattattattattattatttgagacagagtgttgctctgttgcccaggctggagtacagtggcgcaatcttggctcactgtaacctctgcctcccgggttcaagcaattctcctgcctcagcctcccgagtagctggggttataggcacccgccaccacgtccagctaatttttgtatttttagtagagacagaattttaccatgtttgtcaagctggtctcaaactcttgagctcaagcgatcctcctgcttcggcctcccaaagtgctgggatgatgggcatgagtcaccgcgcctagccaagctggccattttggactcaagaccttcacatttattcctgaggaaagggaaaaaaaaaaaaaaaagaaggaaaactccctctcactacacatagtttcaaaaactgccctttcagtggaaaagttttttacgtcttaagaaaaacctgattgtttaaagtcaggtctgcagtaaacgggcggctatttttaagtgcttggggacatatgtctgcaacccatggaaagaagagaagccgtttgtcttgggagcttgtccagaatgactggagtgacgtggagtgcggggttggaggtgggagtgggggggacacgagctgtcagcctgccagaagcacaaaaaaactcccaaaatattccagaacattccttctcgagtcgtcagaaatcatactatccgggccgcgcctcaaagttcccactcagcaagcagttgttttccgtttcattttccctcttcttttttttttcccctcaaatcacatttgtttttccacaatcgaaggcgctcacacacatctcgccctgaaattcagacacactgttctcacctagaattgtaaacagcaacctctccaccccctcccgtggccgggtgtttgggtgatgctggaaaaatcttctaaaggcagggagaaaaaaagggagttttccaaaaatcgacacagggcttacgttacacagagtttatgcaatcagcccctggaaacaactagacgggcctccccagctgcagaggctctgagtagcaataaagtcgtgagaagggaaagtcagcctttggcaagaatccccgactcccccatgaaagtgataagggcggtgtggaccgcagctgggaggccaactgcgtatttgaaatatgttggcaaggccaggttctcgtaaagcatcacagaggtcctgtggaatagattcctccagcctgagaccctggcgcacccttgggtcactggtggtgtgccaggattttatttacttatttgcttgctcgtgtgttaatttttttagagacaaggtcttgctgtgtcacccaggctggagtgcagtggtgcaatcataactcactgcagcttcaaccccccaggctcaagggatcctcccaccctcagcctcctaagtaggcacatgccacccggctcagctaagttttgttgtttttgtttttgttttaagtttttgtagagatggggggaggggttttgctatgttgcccaggctggtctagaacgcctggccttacgtgatcctcccacctcggccttccgaagtactgagatgacaggtgtgagccaccacaccaagcctcaacaggagggtgtagacactttctagcagcatctcctccaccctcctagggcccttgggggctctatttggttcctaatgtcttctcccattttgcagaaaacaaaacccaaagtgcagagagaggaggtggaatgtgattcagggataaaccacacagagaaagcctaaagtgaaatctgtctgctgccacgggatttcccttaaagatccctgtccctcggccgggcgcagtggttcatgcctgtaatcccagcactttgggaggccgaggcgggcggattactggaagtcaaaagttcgagaccagcctggccaacatggcgaaaccccgtctctactaaaaatacaagaattagccgggcatggtggcgagtgcctgtaatcccagctactcaggaggctgaggccgaagaatcgcttgaacccgggaggcagacgttgcaatgagccaagatcgcaccactgcactccagcctgggcaaagagggaaactctgtctcaaaaaaaaaaaaaaaaggaaaaagaaaaagaacaagaacaagcaccgactacatgcagaacatgaaggaactgagtggacgtgatgctgaacaatgaaaacgggccagccatggtggctcacacctataatcccagcattttgggaggctgaggcaggaggatctcctgggcccaggagttcaagactagcctaggcaacacagtgagacctcgtctctacaaaaaatttaaaagtagggcaggaggatcacttgagcccgggaggtcgaggctgcaatgagctgtgattgcaccaactgcactcctgcttgggcgagaggagtgagaccccaactcgaaaaaaaaaaaaaaaaaagaggagggggagggggagggggaggaggaggagcatcactgtgattccactttagggaaattaggcaaaactcctctccagcgacagagcttggagttgcgcggagagggaggctttgcaggcactagacattcctgtgtctggatccagggaactgatcctgccagcagaatccagcgtgtacactcgagatgatcgcgctgtgcggcatgcagttctgtcttcattggaaaagatcaaggctgggtgtggtggctcacgcctgtaatcccaccactttgggaggccaaggccagtggatcacttgaacccaggagttagagaccagcctggacaacatagtgaaaccccgtctctaccaaaaatacaaaaaattagccgggcgtggtggcgaatgcctgtagtccaagctacttgagggggtgaggtgggagacttctttttttttttgagacggagtcttgctctgttgcccaggctggagtgcaatggcgcaatctcggctcactgcaacctcctcctcctgggttcaagtgattctcctacctaagccttccgtgtagctgggactacaggtgcccaccaccacgcctggctaattttttgtatttttagtagagacagggtttcactgtgttggccaggatggtcttgatctcctgacctcgtgatccgcctgcctcagcctcccaaaatgctgggattacaggtgtgaaccatcgcgcctggccgagaatttcttgaacctgggaggtggaggttgcagtgagctgagatcacgccactgcactccagcgtgggcgacagagtgagactctgtcttaaatttaaaaaagaaaagatcaaacaggcatttattgagcacctgttgcatgccagaccctaaaaaggcaacgaggacagagacccccgccactctggaccaggaggccaagtggaggagacgcaaaccaagtaagatgctgctgcagaaacttccagccacggtcgatccatgcaggtggttggaatcccagaagccccatgccccagagaacccctgctgtgtctggaaagaaaaaccaatcagttctgactctggctgtgcagcagggtaagcagagggagtccacagacgagggataaggctctgtcctggtctcaaagatcaaggaggagtggatggtggtagaaagaggtcccagcgcgtgatttgattggaccagtgttcacagggccacttcccagtccaggatgagcaggtgtgaaaatgcagcctccagcctgtgcagtggctcatgcctgtaatcccaacactttgggaggctgaggctggctgatcacctgaggtcaggagttcgagaccagcctgaccaacatggagaaacgccatctctactaaaattacaaaattagccgggcgtggtggcacatgcctgtaatcccagctccttgggaggctgaagcaggagaatcgcttgaacccgggaggcagaggttgcggtgagccgagatggcaccattgcacaccagcctgggcaataagagcgaaacttcttctcaaaaaaaaagaaaaagaatagaaaatgcagcctccgtgacttgcccgaggtccccaagctgggacaaaatgggatacatctcagcagccaggtttgtccccaaagggggctgtaaaacctcgtgggaacccacagggacccgccccttgaaggtggtgatggtccccactgcctgctggcttcgctggtgactcagtacccaccaggccaaggtgtgtctgggagctgcctctctggacggccaccccaccttttgtacatggcctcttggtgcctgggacacagtgagtcacaagacaaagccgtcagattgtctggggcaaaaccctttgtggcaacagatggacaagcctggtaaatggcccgggcagctgggcagccagcgctttgtaaaacctttccaagtggtcctctttgaacctgatgaggacaaaagccaatggccaatcatctctgaaagtcctcaaaagtgcacagacatacccttctttgtgcatggggacagaagactttcaacgtgaatgcgattccttcattctgtcccggtgagcctcacttatttggggcatcaagtatcccagcctggaagacaaattgtttcaccttcaccatgaatggtgtgtgtgtgtgtgtgtgtgtgtgtgtgtgtgtgtgtgtgtgtgtgtgtgtgtgtttgagatggagtctcattctgtcacccaggctggagtgcagtggtgcgatctcagttctctgcaacctctgcctccccagttcaggcgattcttgttccttagactcccaagtagctgggactacaggtgcccaccaccacggccgactaatttttgtatttttagtagatacagggtttcactatgttggctgggctggtctcgaactcctgaccttgtgatccacccgccccagcctcccaaagtgctgggattacaggtgtgagccaccacgcccagcccattgtctctatttggaaggaatgagcagcatgttgcccctgacgaggagaaagggagagacaggcccacagcctcctcacccccacccagttccacccaccggtcacctgagcaatcctctcatcttggcccaaaaccaaccaggggcagggaatgaggctgcgttcagtgcaggcagaactctaagaggctcccaagattccaggcagtctgcgtacacacctgctataatcccgtaagtctgggtgtgactagtgagtcagtgagggtgtcacttccttgataaggtgacattttaaggcaaaggtgagaaaaccttaccaatataattaaggtccaaaataatttgattttgagttcatcaaatgggagcttaccttgggtgggcctgacctaatcaggagagtgctttgaaagaggatctaatggtaatttttttttcaaccatcaattttgctcctgagtctaatggcaaattttatgttatgtatatttaaccacaatttaatttttttttgagacggagtttcattcgtgttgcccagactagagtgcaatggcgtgtgcagtcttggctcactgcaacctccatctcccaggttcaagcaattcacctgcctcagcctcccaagtagctgggattacaggcatgcaccaccatgcccagctaattttgtatttttagtagagacggggtttctccatgttgggcaggctggtctcaaactcccgatctcaggtgatctgcccaccttggccttccaaagttctgggattacaggtgtgagccaccatgcccagtccttaaaatttttaatttaaaaaaaaaaaccgtgatggcaagtgaaaacaaccaaagcgtccaccaacagatgaatggatacacaaaatatagtgtagccatagagtggaatattattcagccaggaaaaaggaataaaattctgattcatgctacactgtggttgaagcttgaggacattatgctaagtgaaatgagcccatcacaaaaagacaactactgtctgatttcacttataggaggtctctagagtggtcacacttatagagacaggaagtagaatggtgggtacgaggggctagaggagaaggaatggggagtttgggtctaatagggacagagtttcagtttgggatgataaagaagttctggaaatagaaagtgacaatggtggccaggcacggtggctcatgcctggaatctcagcgctttgggaggctgagaggggcagatcgcttgagcccacgagttcaagaccagcctgggcagcatggtgaaaccccatctctacaagaaatttaaaaattaggcaggtggtggtacatgcttgtagtccctgctactcaagaggctgaggtgggaggatcactggagcctgggagggtcgaggctgcagtgagccaagattgcaccactgcactccagcctgggtgacagagtgagatcctgtctcaaaaaataaaaagtggcaatcgttacacaacatcatgaataaacttaatgccactgaattgtacacttaaaaagagttaagatgaggccaggtgctcacgcctgtaatcccaacactttgggaggccaagtaggggtgtggattgcttgaggccaggagtttgagaccagcctgggcaacatggcaaaaccccgtctctacaaaaaaatacaaaaattagccaggcatggtggtgcacacctgtaatcccagctactcgggaggctgagggatgagaatcacttgaacccaagaggtggaggttacagtgagccgagatcactccattgcactccagcctgggcgacagagtgagactctgactcaaaaaaaaaaaaaaatggttaagatgaattttaataaatgttatgtatgttattttaccattcagggggttgtctttgttttgttttagagacagggtctcactatgttgcctgggctggagcacagtggcactgtaccgtacaggacaccctgtgatatggttcgtagtctccagggggggagagaagaatgacattactcccaatatcgtggggagtgtccacccccctgtgatattgttcataatatccagtcccccctcaatattacacacggtatcacggggaagtgtacacaccctacacaccccctgcgatattgagggtactatcatcttgtcacttcctgggctcagtggctcacacctgtaatcccagtattttgagaggtggaggcaagggaatcacttgaagtccaggagttcaggaccaaccagggcaacatggagtgccctctgccctccccaccaaaaaataaaaataaattagctaggtgtggttgctaattattaatattatgtgtgatatcacaggggggtgtacacactccctgtaacattgggggtaccatcattctgtcccccctttgatatgacgcacaatatcacttgagggtgtacacaccccctacaatattgggaatactatcatcctgtcctcccctggatattatgaccagtatcacagaggggtgtacatgccccctgcgatattgggggtactatcatcctgtccccccctgtatattatgactggtattatggggggtgtacacgccccctgcgatattgggggtactatcatcctgtcccccccgtatgactggtattacaggggggtgtacacgccccctgcgatattggaagtactatcatcctgtccccccatctatattatgactggtattacaggggggtgtacacgccccccgcgatattggggatactatcatcctgtcccccctgtatattatgactggtattacaggggggtgtacacgccctctgcgatattgggggtaccatcatcctgtcacgccctgtatattatgactgctattacagggggtgtacacgccccctgcgatattgggggtactatcatcctgtcatgccctgtatattatgactggtattacagggggtgtacacgccccctgcgatattggggatactatcatcctgtcccaccctgtatattattacaggggcgtgtacacaccccagtgacattggaggtgtgatcatcctgtccccctttgtatattacacgtgccatcacagggggtgtacacagtggcatcacagctcactgcagcctggatctcccgcctcagccccccaagtagctgggactacaggcgtgagcaaccacacctagctaatttatttttattttttggtggggtgggcagagggcactctatgttgcccaggctggtcccaaactcctggtcttcaagtgattcccctgcctccctctcccaaaatactgggataacaggcgcgagccactgagcccagctcaccttaatttttttgttgttgtttaaaacaaaaatcaatgcatacaggctgggtactagttatttggacaactagtctcaaactcctgggctttagcctgtaatcccaaaaccccatctctacaaaaaataccaataaaattggccaggtgtggtggtgcacaaatgtattcccaactactcgggaggctgaggtgggaggatcgcttgagcctaggaggccgacgttgcattgaaccagatcacgccattgcccttcagcctgggcaacagagagagaggagactccgtcttaaaaaaaaaaaacaacaacaacaacaaaaaaaacggctgagcacggccgctcacgcctgtaatcccagcactttgcgaggctgaggcgagcggatcgcctgaggtcaggagttagaaatcagcctggccaacatagtgaaaccctgtctccactaaaaatacaaaaaaattagctggatgtggtggcaggcactcccagctactcgggaggctgaggcaggagaatcgcttgaacccaggaggcggaggttgcagtgagccgagatcgcaccactgcactccagcctgggcaacaagaatgaaactccatctcaaaaaataaaaaaataaagccaggctcagtggctcacaacacctctaagcccagcactttgggaggccgaggcgggtggatcacctgaagtcaggagttcgagaccaacctggccaacatggtgaaactccatctctactaaaaatataaaaattagccaggcatggtggcctatgctgtaatcccagctactcaggaggctgagacaagagaatcccttgaacccgggaggcagaggttgcagtaagccgagatggtgccactatactccagcctgggcgacagaccaagaagactctgcctcaaaaaaaaaaaaaaaaaaaaaaacaacaacaatgggaagcctctgaaactccccttccccaggggtctccgggggtctccacactcctcggctgagtcagccttcctcctgcaaacagcccagggttcaccaagtgtacaaggctgtcgtgggccccatgccccttctcgccacaggcttgtgcaggcacggggccgtccccgcttgattgctaggggtttagccaatattttcttacggggcgcccttgctgggacacaggtgcaagtgtgacatcgtgggctgtgagtcaggccttggcactccttgcacggccggccggcatgagtcaggctgcatttgcccactgttcctgtcttttctcttgttctgaacaccgcatgtgccaggccttctgtgggtcatcagtcattattttgggtatgcagcgcagatcactcagggacagacttctctgggtcaggggagctgggactttacttatcaaattgcaaatgtccaacataccccatgcagaaccagtgacacggagagaggtttccatcccagggctggggtcggggagggtgtcgaacacccagtacagcccccagggtttcctagaaatgcaaatcacagctctgaagtgcagcctggcctcttatggttagacacaggttcacacctgagaaagcttggcaacgtctagagacatttttggtcctcacgactcggggaggcgcgtcgggggaatgctattaattgtgggttttgccattaaaaaaaaagtaatggcaagggccaggcgcggtagctcacgcctgtaacccagcactttgggaggccgaggcgggtggatcacctgaggtcaggagttctagaccagcctggccagtatggtgaaaccctgtccctactaaaaatacaaaaatcatggccgggcgcggtggctcacgcctgtaatcccagcactttgggaagctgaggcaggtcgatcacgaggtcaggagatcgagaccatcctggcgaacactgtgaaaccccgtctctactaaaaatacaaaaaaaattagccaggtgtggtggcgggcgcctatagtcccagctactccggaggctgaggcaggagaatggcatgaacccagggggcggagcttgcagtgagcggagatcacgccactgcactccagcctgggcaacagagcgagacaccatctcaaaaaaaaaaaaaaaaagtacgaaaatcagccaagcatgatgccgcgcacctgtcatcccagccactggggaggctgaggcaggagaatcgcttgaacccaggaggcggaggttgcagtgagccgagactgcagcactgcactccagcctgggcgacggcataagattccatctcaaaaaataataataataataatggcaagaacggcaatgacttttgcaccaacctaatagtatctggtgggtgcaggccagggatgctacaatgcacgggatggcctctgccacacagataatccggcctcaagtgctgaagttgggaaatcctgcttaccagcccctgaagagtccatttctcatctcatgccggcttaccccctaccaccttttttttttttttttttgagacagtctggctctgtcccccaggctggagtgcagtggcacagtcttggctcactgcaacctccgcctccctggttcaagtgattctcctgcctcagcctcctgagtagctgggattacaggcgcgcaccaccacgcccagctaatttttgtatttttagtagagacggggtttcgccatgttggccaggctggtctcgaactcctgacctcaggtgatctgcctgcctagagctcccaaagtgctggtattacaggtgtgagccaccgcgcctggcctaaataattttaaaataggtcagttgacagtcttcaggcggcaagttagagaaacacatgcaggcagatgcatgcttgtttgaggctgtaaagtgtccacattgggaaactggggagaagataggagaactatgtaggggctctaggttctgcagctggcaatattcttctatgtccacttcctcccattaaaattcggcctccagccaagtggccagtgtctgggatatgttattgtgtctggctctgaggaactggaactccttccagttcttgaagatacttggggagggaagatgcttggggagcatttgtttggctccccagccataatgcacagtattggcatgactgggggtatggatggggacactgggcatccccgatatgatgtgatgaggagggcatgctcccgtcttcttccccaaaccccacaattcctgtctaaccacaagaaaatgtcaaacacagattggggtacacttggatgccctggggggggaccggccagcactctttaagactgccaaagtcagccaggcacggtggctcatgcctataatcccagaattttgggaggctaaggcaggttgatcacctgagggcaggagttcaagaccagcctgaccaacagatgaatccccctccctactaaaacacacaaaaaagtaggtgggtatggtgggtgggcgcctgtaatcccagctactcgggaggctgaggcatgagaatcacttgagcccaagaggcagaggcagaggttgcagtgagctgagatggtgccactgcattccagcctgggcaagaagagcgaaactccatctcagaaaaaaaaaaaaaaaaagactgacaaagtctctcacacctgtaatcccagcacttcaggaggccaaggcaggaggatcacttgagtccaggaattcaagaccagcctggacaacatagcaagaccccatctgcacaaaaagtttaaaaaaatacccaagcatatggcacacacctatggtccctgctactcaggaggctgaggtggaaaaatcacttgagcccaggagcttgaggctgcagtgagctgcgatcaagttactgcacttcagcctgagcaacagagtgagagcctgtctaaaaaaaaaaaaaaaaaaaaaaaaaaaaaaaaacgggccaagcacaatggctcaggtctgtaatcccagtacttttcaaggctgaggcgggcagatcactggaggtcaggaatttgagaccagcctggccaacacggtgaaaccccatctctactaaaaatacaaaaattagccgagtgtggttgtggatgcctgtaatcccagctactcgggaggctgaggtgggagaatcggttgaacccaggaggcggaggttgcagtgagctgagattgcgccactgcactgcagcctgggcaacaagagtgaaactccgtctaaaaaaaaaaaaaaagaaaaaaaaaaacaacaagagattgaacactgctgaggtcatgaaaaacaaggaaagactaagaaaccatcacagaccagaggagatcagggaggaacgggggctaaataaggtgaaggatcctggaagagagggaggacatttgtgggaacattggtgacatccacatagaatgtctggagtttagttgatagcatcattgtcccagcattaatttcttagtttcaccaaatgtactgaggtagggaaagatgtcaacatcagaggaagctggtggaaggggacatgggagtgctgcatagcctctttgcaactttcctgccattaaactgattccaaaataaaacacttataagacgtttattttacaactcatgccaggtgcagtggctcacacctgtaatcccaatgctttgggaggccaaggcaagaggactccttgagttcaggagtttgagtccagcctgggccacacagcaaaatcacatctctacaaaaattacaaaaattagccgggagtgatggcatgtacccgtagtcccagctacttgaggggtcgcgatgggaggatcgtttgagcccggaaggtcaaggttacagcctgggcaacagagtgagaccctgtctcaaaaaaaaaaaataaaaaaaagtaagctaagaagggagacataagcagcaatattggaacttacccatacttaaataaaaaaatccttccctatctgaaatgtatttatttatgattattttttagacagggcctcactctgttgcctaggctggagtgcagtggtgtgaccatggctcattgcagccttgacctcctgggctcaagcaatccggctgagtagctgggaccacaggcacgagccaccatgcccggataattttttttttctttttttgagatggagttttgcttttgttgcccaggctgcagtgcaatggcacgatcttggctcaccgcaacctccacctcccgggttcaaacgattgtcctgcctcagtctccctagtagctgggattacaggcagatgccacgacgcccagctaatttttatatttttagtagagatagggtttcaccatgttggtcaggctggtttcgaactcctgacctcaggcaatccacctgcctcggcctcccaaagtgctgggattacagtcatgagccaccatgcccggcctcccggataatttttaaaaaattttttgtggctaggcgcagggctcacgcctgtagttttaacactttaggaggccgaggtagatggatcacctgaggtcaggagttcgagaacagcccggccagcatggtgaaaccccgccccgcctctactaaaaatacaaaaattagcaaggcgtggtggtgggcgcctatactcccagctactcgggaggctgaggcagcagaatcgcttgaacccgggaggtggaggttgcagtgagtcgagattgcaccacttcactccaacctcggcgacagagactgtatcaaaaaaaaaaaaattttgttgagataaggtcttgctgtgcttcccagaccggtctcaaactcctgggctcaagcgatccactcgccttggcctcccagagtgctgggattccaggcacgagccactgcacctggcctctatctgaaatttacatttaagtggggggtcctgtgtttcagcccaaaactctagtctaggcggtagaaaggacccagtgggctgggggtggggcccagagtcagcacccggctctggatctggcacctgggtggcaggggttccattaactgaggtgggaaacagaggccggagtggaggggggataatgagctcattttacagcagctgctaatggctcttaataatgatggtgatgacgataattgcacctcccccacagcataaatcttgctccacccgggctggttttggactcctctggctccttacccggcctgggaacctgaggggcatcgagccagactcacgcccgcgtcccccgccacgcctagccctggtgtggaactgcacagatgcccccactgtcccctcccgccgtcccgagttccctggggttgctattaagaaacctgtgacctggaagctccctcctggcttcaagtcttcctgcctttgcttcgagtcgtcctgcctttcaacactgaaccaatgtagttcttacatatattgactgatgtctcctgtctccctaaatgtccaagactaagctgtgccccgaccaccttggacacatgtcatcaggacctcctgagtctgtgtcatggacgggcatccccaaccttggcaaaataaactttttcttttttttttttttgagacagagtctctgtctgtcacccaggctagagtgcagtggcacgatctcggctcactgcaacctctggctcctgggttcaagtgattcttctgcctcagcttcccgagtagctgggatgacaggcacccagctaatttttgtatttttagtagaaacggggtttcaccatgttggtcaggctggtctcgaactcctgacctcaggtgatccgcccgcctcggcctctccaagtgctgggattacaggcatgagccaccatgcccggccgcaaaataaacttgctaaattaactaagaactgtctcaaattttcggggttcacagtggcttccaacaacggaaacgtgttctctcacagtcctggaggtcccaagtcgaaggctgacaggtgagtttcttctggggaccttgaaggaggggagggacagggggctaaggtgactcccaaggtggcaggtggatcgtagtcccagctactcaggaggctgagacaggagaatcacttgaacctggcaggcggaggttgaaatgagccgaggtcacgccactgcactccagcctgggcaacagagcaagactccatcaaaaaaaaaaaaaagtgtcagaggaatgcaaacaaatccttacacacacacacacacacacacacacacacactcacaatagccccaaggtggaagcaaatcaagtgtccatcaacaggcaaatggaccgaaacaatgtggtccatccacaatatggaatattattcagccatgaaaaggaagcactgacccatgcttcagcatggatgaaccccgaaaacacgatgctgagagaagccagacacaaaggccacatagcgtgagattccatctgagtgaaatgcccagaataggcaactccatacagccaggaagcagatgggtggttgccagggactggggaaggggaatggggagtgactgctgatggggacagggtctccttttgtggggatgaagatgtcctgggactagtcagaggtagtggctgcacaacactgggaatgcgctaaatgccaccaaattgtacatttaaaaatggctacctttggccgggcctggtggctcacctctgtaatcccagcactttgggaggcaaaggtgggaggatcacttgagcccaggagtttgagaccagcctgggcaacatggtgagacccatctctacaaaacatttaaaaattagccaggcatagtggcacgcgcctgtagtcccaactacttagaaggttgaggtgggacgattgcttgagcctgggaggtcgaggcgagctatgatcacaccactgcattccagtctgggcaagaggcgagaccccccatctctaaaaatataaaataaaattggccgggcaaagtggctcatgcctataattgccaacactttgggaggctgaggcgggtgaatcacctgaggtcaggagtttgaaaccagcctggccaacatggtgaaaccccgtctctactaaaaatccaaaagttagccaggcgtggtggcaggcgcctgtaattccagctactcaggaggctgaggcaggagaatcacttgaacccgggagatggaggttgcagtgagccaagatcatgccactgcactcgggcctgggtgacagagtgagattccgcctcaaaaaataaaataaaatttaaaaatggctaactttatgttatgtgaattccacctcaattttttaaaaaatgaaaatgcgaaacaaatggaaagagaagatatttacactccattttccaaggaaattgttacaggcacccagaaacacccagtcacctaaaagatgtggaattttacaaatacacttcaagcatgttaaatggagtccttcggtgacttaccccttccgtgtaagatttacctcttacatgaagagtttctcttcatgatagctgtcattattaataatatataatgacataattgcttaacaacatcattatgattttccaccccaattatgaggctgaagggcatcaggctgaagcactgaaattacaaggcaagtcagaagtctgctcccacaaaaagagctccccaggatcccaaaatgtggggctcaaactcaaccactgtccccctggccctgggcctccccactctccccatcaaaatggacccattcctgctccaggcaccaattctgctgaacacagaagacacaggaagccatctgcttcctggctgtatggagttgcctgttctgggcatttcacacagatggaatctcacactacgtggcctttgtgtctggcttctctcaacatcatgtttttggggttcatccatgctgtagcatgggtcagtgcttccttccttttcatggctgaataatattctatactgtgcatggaccacattgtgttgatccgtttgcctgtggatggacacttgatttgcttccactttggggctattgtgagtgtgtgcgtgtgtgtgtgtgtgtataaggatttgtttgcattcctctgacacttttttttttttttgatggagtctcgctctgttgcccaggctggagtgcagtggcgtgacctcggctcatttcaacctccgcctcccaggttcaagtgattcgcctgtctcagcctcctgagtagctgggactacaggcgcccaccactacacctggctaatttttgtatttttagtagagatgggctttcaccatattggccaggctggtcttgaactcctgacctcaggtgatccacctgcctcagcctcccaaagtgctgggattacaggcatgacccactgtgaccggccattttttttttttttaaatagggtctcactctgtcacccaggctggagtgcaatggcgttatgagaagggaagtgtgccagccacctctggtgggcagagcatgtcagggagtccaaaagggctgatcaaagagatggctttgccagacacaatggctcatgcctgcagtcccagcactttgggagcctggggtgagataacttgcttgaggccaggagatcaaggctgcagtaagttgtgatcatgccactgtactccaggatgctgtctctacataaataaataataaattatactgtcctccagcctgggtgacaagagcaagacgctgtctataaatacataaataaataaattacacgtggtggctcatgcctgtaatcccagcacttcgggaggccgaggcaggcaaatcatctgaggtcaggagttcgagaccaacctggccaaacccagtctctactaaaaatacaaaaaaaatcagacgggcgtggtggcaggcacctgtaatcccagctactcaggaggctgaggcaggagaatcgcttgaacccgggaggcggaggttgcagtgagccaaggtcgtgccattgcactccagcctggcggcagagagagactctgcctcaaaaaaaaaaaaaaactaataaattttatgatgtgtaaatgatatctcaataaatctgtaagaactaaatgaaacaaaagagaaaaaggagtccctagcccagatatatggcaaagaaagaaagaaaaaaaaaggccgggtgaggtggctcttgcctgtaatctcagcacttttgggaggtggaggcgggtagatcacttgagcccaggagttccagaccagcctgggcaacatggagaaaccctgtctctactaataagacaaaaaaaaaaaaatagccaggcgtggtggctgccacctgtagtcccagctactcgggaggctgaagtgggaggatggcttgagcctggaaaatcaaggctgcagtgagctgagatcgcaccactacactccagccagggcaacagagcaagaccttgtctcaaaagaaaagaaaaaagaaatcactctgaagttagcactcgtaaatcagacatttacaaccacgtacttaaaatgtcccagatgctagtgatgttcataccgctgacattaacagtccagattcgccactctcctggacgtgacccctcggccttcaagtttctgcttaaaaggttgattgttcgtttgtttgtttgtttgagacagaatctcactctgtcaccaggctggagtgcagtggcgtgatctcggctcactgcaacctctacctctcaggttcaagcgattctcctgcctcagactcctgagtagctgggactacaggcgcatgccaccacgcccagctgatttttgtatttttagtagagacagggtttcaccatgttggccaggatggtgtcgatctcctgacctcatgatttgcccgcctcagcctcccaaagtgctgggattacagccgtaagccactgcacccagccttaaaaggtttcttccgggccgggcgcagtggctcatgcctgtaatccgagcactttgggaggccaagacgggcagatcacgaggtcaggagatcgagaccatcctggctaacacggtgaaaccccctctctactaaaaatacaaaaaattagccgggcgtggtggcgggcgcctgtagtcccagctactcgggaggctgaagcaggagaatggtgtgaacccgggaggcggagcttgcagtgagccgagattgtgccaccgcactccagcctgggcgacagagcgagactctgtctcaaaaaaaaaaaaaaaagtttttttctgcctgcctcccctccaatccaagccagagccctgttatcctgccctgagcactccccacttttccctcagccttcccatccgcctgtgactctgtgttgcttggatagagcttcagttaaccctcaggctcctccctgtctggaagctccatgagggcaaagactggcccattctggtagacagctcacactccagcacctgcccaataagaagtattccttagccaggcatggtggctcacacccagcactttgggaggccaaggcaggaggatcatttgagaccaggagttggagaccagcctgggcagcatagggagaccctgtctctacaaacaaaataaaaaattagcagggtttggtggcatgcacctgtagtcccagctactcaggaggctgaagcaggaggatcacttaagcccgggagtttgaggctgcagtgagttatgactgcaccactgcactctagcctgggcaatagaacaagatcctgtctcaacaacaacaacaaaagagtgttcatcagtgtctattaaacgcatactgaggccaggcacggtgtttcacacctgtaatcccagtactttgggagcctgaggtgggcagatcacctgaggtcaggagttcgagaccagcctggtcaacatggtgaaaccttgtctctactaaaaatacaaaaattagccaggcatggtggcacactcctgtagtcccagctactcgggaggctaaggcacaagaattgcttgaaccgggaggtggaggttgccgtgagccaagattgcgccactgcactccagcctgggcaacagagaaagactccatctcaaaaaaaaaaaaaaaaaaaaaaaaaaagcatactgagaggcagcgatagtctgggaattcagtccagactctggagttgaacatagctctgctggcttctccctgtgcttgaagctaacgtctctaagctttggccagagtcaagattttctgccttgtgggccacgtggtccctttcaaaatgactcaactctgtcgtcatcccaggaaagtagccattgccaggcgcagtggctcatgcctgtaatcccgacactttagaaggccaaggcaggataggatctcttcaggcaaggagttcgaaaccagtatggacaacacagaccctgtctctacaaaaaatcagccgagcgtggtagcccacgcctgtagttccaagctacttgggaggctgaggtgggaggatcaactgagctcaggaggtcaaggctgcagtgagctgtgatcgtgccactgcactccagcctggaagacagagccagaccctgtctcaaaaagaaaaaaagtagctatagatgatggatctatgaatgggtatcactgacagtaagatgtatttatgcacactgaaatttgattttcatataatgtttgtgtttcacgaagtactattcttttttttccaaccattcataaatgtaaatccatgcttagctcatgggccaaatgaaagctgcagtgcccacatattatatgattccattcatataaaaatgttggctggtgcagtggctcacgcttgtaatcccaccactctgggaggccgaggcgggcagatcacctgaggtcaggagttggagaccagcctgaccaacacagtgaaaccctgtctctacaaaaaatacaaaagttagccaacatggagaaaccctgtctctagtaaaaatacaaaattagccgggtgtggtggcaggtgcctgtaatcccagctactcaggaggttgagacaagagaatcgcttgaacccggaggcagaggttgcagtaagccgagatcgcgccattgcactccagcctgggcaacagagccagactccgtctcaaggaaaaaaaaaaaaaaaaaagcctagaacaggcaaatccatagagacaggaagcagattggtggttgccaggggctgggggaggggagtggggagtgactgctgatggggacagggttttctttggcggcgacagaaatgttctgcagccagacagaggtgacattcgcagagcactgaatgtagcaaatgccactgaattgtgcactttaaaatagtgaatttcagctgggcgcagtggctcacgcctgtaatcccagcactttgggaggccgaggctggtggatcacctgaggttgagagttcgagaccaccctgactaacacggtgaaaccccatctctacaaaaaatacaaaagttagccaggtggagtggcgcacgtctgtaatcccagctacttgggaggctgagacagaagaatcacttgaacctgggagatggaggctgcagtgagccgaggtcgcgccactgtactccagcctgggagacagagtgactgtctcaaaaataaataaataaatgaaataaaataaaatggttaatttcaggttatgtgagcttcacctcgataagaacatatatacatatggatataatttacataggaatatgcatagaatgtaaagaattacactattgatattttgatttttttttaagctgcaagccaccatttgccagcctccaattaagataaataaaaatagctcccagagatggaagggttcttctaggaaaaatctttttttttttttttttttttttttgagagagagagagtttcgctcttgttgcccaggctggagtgcaatggcgccatctcggctcactgcaacctccgcctccagggttcaagcgattctcctgtctgctaccttcataaacacatgatgggcaggcattctcatgcccctttgacgaatgagggactgaagttcaaaaagaaaacatcaggccagcgcagtggcccacgcctgtgatcccaacactttgggaggctgaggcaggcggatcatcactgggatcaggagtttgagaccagcctacccaatatggtgaaaccccgtctctattgaaaatataaaaattagctgggcgtggtggcacatgtctgtaatcccagctattcaggagactgaggcgggaaaattgcttgaacctgggaggcagagggttgcagtgagctgagattgcgccactgcactccagcctgggcaacagggcgagactccatctcaaaaaaaaaaaaaaaaagaatatcattcactcaaggtcaacaagtacaagtgccagaatctaaactcagggctccagctgtccatcgcttacctcactgaacagaccaactgggaggattaaatgagaaaatacatccagacaagcctggccaacatggtgagactcccgtctctacttaaaatacaaaaattagccaggtgtagtggcgtgtgcctgtaatcccagctacttgggaggctgaggcaggagaatcacttgaacctgggtggtggaggttgcagtgagccgagatcgtgccacttcactccagcctgggtgacagagtgagacctggtctcaaaaaaaaaaaaaaagaaaatacatccagatcctcagcatagggcctggtatacattaggtgctcagtaagtattgctctctccccctcttctgtcctgtgtgtcaataagagcgaggcagtaatggcctggctggcaagaagatgatgagaggttctgatgggaacccatcagtcatcagcccagtgcaatcccgcatcttccccaagcactcgcgacctatttatgtagtagtaagaaaactccagaggcagggccaggcgtggcggctcaggtctgtaatcccagtgctttgataggcaagggcagaaggatcgcttgagcccaggggtttgaggctgcagtgacctatgatcacaccactatactccagcctgggagacagagcgagaccctgtcaaaacacacacacacacacacacacacacacacaaactccagagacaaccaggcaaatcacaaagtgacctttcctatcagacctcagctccaagcattgcagcgacaaggtggtgacccgagataagaagcgcacttgcagagggtgcctctgcccgtatctctccgcatcctcaagaaacacagaactatcaaacatttttgcaacatgaggagccaagttttgcaacatactgaaaaagggttgtgcaaacttcagcagaaacaccccaattgccccagctgggagtcatcatccagttgctgctgtaatgtgattgtaattcctccagtgttcataatttgtcttggaagctcagctgtattttacatgacgtgttttctgtagaattcctgagtacttgctcttgggatctgagccaagtgcacacaatagctatttggggcaaaacagctggtaaagagaaaggcagcttagaccctgaagaaaagtggaaagaattcaaggttactagaaatgtccagggcccagtaaaagaagattgtaatctctctatgtgcagaaacaggccatatacttcatcagtttcctctccatgctcagctcagcatggagcggaagctcagtatttatttgtggctcagacgaaaaacttcttgtttgcaagtttcctgagcccttgaagacagcctggcaggagacaacaaatgcaaagctgcacacgtaccacttatccaatcccctgttagtgacagacatcaccagtcaatcagtcaatcacagacatgaccaatccatcacagcactgggcctggctacaacctcagaatctgcaccagcacagtgctaaaagcaactattatcaacagatttgaggaaaatattctgcctccttggtctacatttataatgttgagttgttaggagaagataaggggcagcaagaaagagatgacaataagataatcaccatcgaggctgggcactgtggctcatgcctgtaatcccagcactttgggaggcttaggcaggaagatcacttgagcccaggggttcgagaccagcctgggcaacaaagtgagaccctgtctctacaaagattaaaaattagccagccaggccaggcacggtggctcacgcctgtaatcccagcactttgggaggccaaggcgggcagatcacctgaggttgggggctcaagaccagcctgaccaacatggagaaacccagtctgtactaaaaatacaaaattagccgggcatagtggcgcatgcctgtaatcccagctactcgggaggctgaggcaggagaactgcttgaacccaggaggcagaggttgtggtgagcagaggtcgcaccattgcactccagcctgggcaacaagagcaaaactccatctcaaaaattaattaattaattaattaaataaaaattagccagtcgaggtagtgcacacctgtaatcccagctactcaggaggctgaggcgggagtattgcttgagcctggaagttgaaggctgcagtgaactatgatcgcatctctgcattccagcctgggtgaccctgtctccaaaaaacaaatcatcatcaggaaacataaagttcccaacagtggccaggtgtggtggctcacgcctgtaatcccaacactttgggaggcctaggtgagtggatcacctgaggtcaggagttttagaccgagtctccctctgtcacccaggctggagtgcagtggcatgatcttggctccctgcaaccctgcctcccagattcaagtgattctcctgcctcagcctcccaagtagctgggactacagatgtgtgccaccatgcctggctaattttgctttgtttttgagatgaagtctcgctctgctgcccaggacggagtacaatcagctcactgcaacctccaccttccaggttcaagggattctcctgcctcagcctcccaagttcccaagtagttgggattacaggcacctgccaccatccctggctaatttttctatttttagcagagatggagtttcactatgttggtcaggctggtcttgaacctcaggtgatccacccacctcagcctcccaaagtgctgggattacaggcatgagccaccacacccagctaatttttgtatttttagtagagacgaggtttcaccgtgttggccaggctggtttcaaactcctgacctcaaatgatccacccgcctcggcctcccaaagtgctgggattacaggcgtgagccaccgcacccagccaaggcttgcagagctctgagggtaaagtcacctaactagttccaggcagggctgagaatgtgacttcatgcccggtgctctttctccaacatcatcattggctgggacttcacgaggacagatacctgtgcaggcagatgccaaccagatagcaggttcataggacaacagcaggagcgggtctgtgctccaggccccctcccagtgccaagcctctcctgcacagagagattccacagtgcctgagatcccctaaaaggctcattcactcatcttcacaatcagccagcaagtactgttgaacactgacaaatgccatctcatattctcaaaaggaaactgaggctccgagaggttaagtggcttgcctaaggtcacacagctaatgtggcaattaaaattcttctaggtcgggcacggtggctcatgcctgtaataccagcactttgggaagccaaggcaggaggatcacttgaggccagccaggagttaaagaccaatctgggcaacacactgaaacctcatttctcttttttttttttttttttttttgagacagagtctcgctctatcgtccaggctggagcacagtggtgcgatctcggctcactgcaacctccacctcccgggttcaagcaattctctgcctcagcctcctgagtagctgggactataggcgctcaccacaacgcctggctaatttttgtatttttagtagagacaaggtttcaccatgttggccaggctggtcttgaactcctgacctcgagatccacccgcctcagcctcccaaagtgctgggattacaggcgtgagccaacattcccgcttttttcttttcttttttttttttgagacaggttctcactctgtcgcctgggctggagaacagtggcacgaactcagctcactgcagcctctgcctcccgggttcaagcgattctcatgcctcagcctcccgagtagctgggattacaggcacgtgccaccacgaccagctgatttttgtagtttttgtagagacggggtttcaccacggtctcttttcacgctggtcttgaactcccgacctcaggtgatctgcccacctcagcctcccaaagtgctgacattacaggtgtgagccactacacctggcccacaagaccagcccacgagacctcatttctgtaaaataaaatgaaaagttcgtgttctttccatgcactggcagctctctgcattggttctgctggccaggcactctgctgaaatgtttcacgctgccctgggaggtcctcagtgggtggccactgtctttacatcacttttgtttcaacaaatcgggtccacagctgggcccagggggacacagagatgagtcaagggaggcccctgtcttgaggggttcaccgtctggggaggaagccaggcgggagaacagctggttaccacgatgtatgagtttcctgtggtggccgcaacaaaagacatagactgggtggcttccaacaatggaaatgtattccccacagttttggaggccaaaagcccaaaatcaaggcatcagcagggttggttccctctggaggctccgagggagaatcttttttttttttttttttagatggagtctcactctgttgcccaggctggagtgcagtgagtgcaatctcggctcactgcagcctctgccttccaggctcaagcgatcctcccacctcaacctcccgagtaactgggaccacaggtatgcgccaccatgcccagccaatttttgtattttttgtagcgagggggtctcactttgttacccaggctggtctcaaactcctgggctccagtaatactcctgcctcggcctcccaaaatgttggaattacagacgtgagccaccacacccagccatctgagaaagaatctgttcccttggctaggtgcagtggctcaagcctgtaatcccagcactttgggaggctgaggcaggcagatcacttgaggtcagaagctcaaaaccagcctggccaacaggatgaagccccatctctactaaaaatacaaaaattaaccgggcatggtggcatgcacctgtaatcccagctacttgggaggctgaggcacaagaattgtttgaacccaaggggtggaggctgcagtgagccaagatcacgccactgcactccagcctgggctacagagggagactctatctaaaaaaaaaaaaaaagaaacaaaaagaatcttttcccagttttgctgctggtggctccggagatatccctgggcctgtggctgcctcactccaatctctggccatcttcacatgcccttcttctctgtgtttgtgttcctgcgtcctttctctcctaaggactcttgtcgctggatcagggcacaccttaatccaggatggtctcacctcaagacgcttcatgatgtctgcagagaaactctttttgtttttgagacagtctcactctgtcgcccaggctggagtgcaagggtgcgatctcggctcactgcaacctccacctctcggattcaagtgattctcctgcctcagcctcccaagtagctgggactacaggcgcaagccaccgtgcctggctaattttatatttttagtagagacggggtttccatgttagccaggctggtcttgaacacctgacctcaggtgatccacctgcctcggcctcccaaagtgcttggattacaggcgtgagccactgtgcccagccaaagaaactctttctaaataaggtcatagtcacaggtgccagggattgagactcagacatttctttgtggggccactatttaacccattactcatggattgaattactcatggcaagaccctgtctctacaaacaaaaatcagccaggcataatggtgcacatctgtagtcccagctgcttgggaggctgagctgggaggatggcttgagcctaggagtttgaggctacagtgagccatgaccgcgtcactgcactccagcctggatgacagagcaagaccctgtgtcaagataaataaataaataaactatggattattattattattagttaataacaatatattcctctctgctcagtaattgtcacaaatgcaccacactaatgcaagatgataataggagaaaggttggggtggtgcgaggggtgctacctgggaacgccgtgtacttcgtgctcaatttttctgtaaacctaaaactgctgtagaaaataaaagtccagaccaggcgctgtgagtcacgcctcccaaatcccagcactttgggaggccaaggcgggcggatcacttgaggtcaggagtttgagaccagcctggccaacatggtgaaactctgtctctactaaaacaaaacaaacaaacaaacaaaaattagctgggcatggtggcgggtgcctgtaatcccagctacctaggaggctgaggcaggagaatccctggaacccgggaggcggaagctgcagtgagccaagattgagccactgcattccagcctgggcaacagagcaagactctgtctcaaaaataaacaaataaataaagtacgttagttaagggaggttgaaaaaaaagagagagagagagacaggcagagacgacggagcttcacaattggaaatggaaagaaaggaacgctggtcgggggcgcagtgagcgcagaggggaatgtgcttggtgtgtttcaggacccaaacagagacagtgagagaggaggaaggcagagaggtacctcagacaagctgcaggtgccagtgagcaaggctcagaggcccaggggaccaaggtgctctctgacaaactagagggatgctgtggtcagaggtctttttttttttttttttcttttaattagacagagtcttactctgtcaccctgtcacccaggctggagtgcagtggcacggtctcggctcactgcaacctccacctcccaagttcaagcgattctagcctcttcagtagctgggattataggcacacgccaccacgcccggctaatttttgtatttttagtagagacagggtttcaccgtgttgaccaggctagtctccaacttctaaccgcaagtgatctgcccgcctcagccttccaaagtgctgggattacaggtgtgagccactgcgcccagccgacggtcttggccaaagcaaaggaacaaacaaacaaaaacccttcccggcagctgcccaggcatcccatatccttgaggagaaattcctgattcccttaatctttccatcattatcatacggggaaactgaggcccagagaaaggcaattcaattcccaaagcacacaagcaggcccatctcccaagcgctggtagagaattcagtgtcacacaagatgtcacctacttccacaacaaagaaaagagcctgtgtgaactcacaatagccatttggggtaaggtactattcttatctgcatttcgaagattgaggaggcaagcccaaacagccaaagccactggttcaaggtcacacagcgcgtgctcagtggctgaggctgactcgcagccatttcagtggcaactgcagaaagcaagtttgtattcaacttgaagtctccggtgactgggtttggtgggggctgcagaggggaccctgcagagtgcatttctgcagaggctgagagtccaagcttccagggcaggagctgcctgcatccctcaccacctggctccaagttcctccttgggatgctcttcctcccatacccacatggtccccaatgactttttcacattagctcacatttcaccccctgggtgagattcagaatttccccattttctccttcccactccctcatctcacactcactttctagtcccttctactgctccatttttctttttaaacccctatcagtaaggccaggcgcaatggctcacacctgtaatcccagcactttgggaggccgaggcgggtggatcgcctgagcccaggacttcaagaccagcctgggcaacatagtgagaccccgtctctacaaaaaaatacaaaaaaaaaaatttagccaggcatggtggtgtgcaccttgtaatcccagctacttgggaggctaaggcaggaggatctcttgagcgcaggagttcgaggctgcagtgagctgtgattgcactactacactccagactgggcaacagagggagaccctgtctcaaaaaaactcaaatgaataaacctctatccttccctccttcactaaagtggaggtcccctagggcagggatcttgtctatctcttggttactgtgtccccagtgcctacccagggctggcagacagttgtaacaggagtgacagtccctggccagcagggatatggtgtgggggacagaggtggagcattgaagggacccattgggcagcattgtcctctgatgcccccgatgctggagctgtattgggggaatgactgtcatcaccgtcctctgagttacttaattcatttatggaagtcagtaaaggaacccagcctgcctgtgcctgccgcaactccaacttctcccagccacctctgcctcagtttccctgcacttgacgggcttattgaggttggggaggagggggtgggtgtctcaaatgtcaaagatttaatgtgtcttgatgttaccacacaaaagttttgttttgtttgtttttttgagacagtctcctctgtcacccaggctggagtgtagtggtgtgattgtatctcactgcagcctcgacctcctgggctcaagcgatcctcccacctcagcctcccactacacccagctaattttttttattttttaagagatgggggccactgtgttgcccaggctggtcttgaactcctggcctcgagtgatcctcctgtctcagcctcccaaagcggtgggattacagatgtgacccactgcaccaggtctacacaaggtgtttttttttacagggtgatgtgcacacggtgggtccctctgggtggtcccacaacagatgaggggcccagcctcacccatccatgaatcctggagactccagacttcccatccatccagggttctgcagccctctctgaggctggagccaatctccccttccgtcaagggatccggggagaccgccaagcccggtgctcccctgagagtctctgagaggccccgacaccgcccccgctccaggtccccgggatgctcgcgcaggcgggagcccggggcgcccgggggatccctgagcgtcacgccgctgttgtggagcgcgtgttgacaacgtcgccggggagacgggcgggggcggggcccgggagagggggaggcgcggccctggcggcgcgcgaggggccgggctgtcagcgcaaggcccaggccgccgcagtggccacggccgctgccgcccgccggcttatataccgcggctaaatttaggctgcgcccggagctcgtccccatccgggacgcgtttccgccgccgccgctttggcccggcccccgcgcgcgccgcgcctataaggcttgggcgggcccggccgcggcccacagagccgtccccgcccgcccgcgccccgaccagcccggcctcgggcagccactcaccggtgtccccgtccgcgtcctttctccccgggtcccggccatggcgctgagtgaacccatcctgccgtccttctccactttcgccagcccgtgccgcgagcgcggcctgcaggaggtgagggcggcggggacggcggggcggccgggaccgtgggcggcgggctcggggtagtagaacgtgggctgcggggtgacaggacgcgaaggcggggactgcagactcaggagaggaggatgcgggccacggggatcgcggacttagggtggtaaaaggcaagcagcgccccccgagccccgccgcccgctcacgcccattgccctgtcgcccgcagcgctggccgcgcgccgaacccgagtccggcggcaccgacgacgacctcaacagcgtgctggacttcatcctgtccatggggctggatggcctgggcgccgaggccgccccggagccgccgccgccgcccccgccgcctgcgttctattaccccgaacccggcgcgcccccgccctacagcgcccccgcgggtggcctggtgtctgagctgctgcgacccgagctggatgcgccgctggggcccgcactgcacggccgctttctgctggcgccgcccggccgcctggtcaaggccgagccccctgaagcggacggcggcggcggctacggctgcgcccccgggctgacccgtggaccgcgcggcctcaagcgcgagggcgccccgggcccggcggcttcgtgcatgcgaggtcccgggggccgccccccgccgccgcccgacacaccgccgctcagccccgacggccccgcgcgcctgcccgcgcccggtccgcgcgcctccttcccgccgcctttcggtggccctggtttcggcgcgcccgggcccggcctgcattacgcgccgcctgcgcccccagccttcggtctcttcgacgacgcggccgccgccgcggcagccctgggcctggcgccccccgccgcccgcggtctcctcacgccgcctgcgtccccgctggagctgctggaggccaagccaaagcgcggccgccgctcttggccccgcaaacgcaccgccactcacacctgcagctacgcgggctgcggcaagacctacaccaagagttcgcatctgaaggcgcatctgcgcacgcacacaggtgggcggcacgcacgagccaggagcgcaggcggggggacgcgggaggagaggtcggattcccagcgcgcgccagaaaatgaatttaggacctcccttggggcgtggctcagggggatctggcaggtggtgcacgcttaggactccccaggaggcgtggctcgggaggttggttgggggggcacacaggaacactccctaaggaagtgtgatccgagaggttggggtgggggcttgcacgcttaggacgaggggggcctccggaggttgggaagagcacttagaaaacctcctggaggcgtggctagggagacagtctcagaaagttggggagggggagcaggtttaggagccgctgggcacttggctcagaatccccggggctgaggctcaggtagttggggagtaggtgcgcgtttaggaaccccggggagatgctgcgtctcaggaagttggggagggcgctcaggcttgggactcctctggggacaaggctcaggaccttggggagggagtgttcgctgggaaaccttgagagattccgtgtcttagaatgctggagagagggtgcatgcttaggacccgtcggggagcgtggctgacaacagtggggagtggaccttgcgctcctccgaccccctgggggtgaggatccggattgtggggggagttggggatgtagggcaaggatccctcaggggcgcaacactaccgcggggagcgcgtcaaggccctggttagggataggttgcgctcgccggggtagccatacgtgccctgtcctgggaggggaactgacgcttactctcgccccctccctgcaggtgagaagccctaccactgcaactgggacggctgcggctggaagtttgcgcgctcagacgagctcacgcgccactaccgaaagcacacgggccaccggccattccagtgccatctgtgcgatcgtgccttctcgcgctccgatcacctggcgctgcacatgaaacggcacatgtagccgggacgcccccgcccacctgcgcgcggccgtggcgggtcccacgcgccgggcgcggccccctcccaaactgtgactggtatttattggacccagagaaccgggccgggcacagcgtggctacagagggtctccctcgatgacgacgacgacgacgccaccaccccagcccccgtctgtgactgaaggcccggtgggaaaagaccacgatcctccttgacgagttttgtttttcaaaatggtgcaataatttaagtggcatcttctctcccaccgggtctacactagaggatcgaggcttgtgatgccttgtgagaaataagggccttaatttgtactgtctgcggcattttttataatattgtatatagtgactgacaaatattgtattactgtacatagagagacaggtgggcatttttgggctacctggttcgtttttataagattttgctgggttggttttttttttaattaaaaagttttgcatcttttaaaaaaaatcacagcactggtctggttgcttggaactggggccttggggcacttgggaggaggggggagcggagagtttgatggagggcagccccactaaagcatcgtgtgcagtgggtcctgcgtctgccagcaccgggactgccagctgctgtgcctgcctgccaggaacctgtgggtttttctgtaaatttagacactgcattttaggactgagggagggttattttaaggttgttctttgagccataaattgcctctttgccccacagctggggaaagtgctggtcccactgacgtggcctcctctacgttgaaaaaaataaaactacttacctcttcctggaagcctctgaggttttagccaaatttctggagtgccagctctatatttttatttttatttttaaagggggttaacctgctgagtttctggcatgttctgccctttactcgtctcgacatttagcaagtcttttcttaaggggtgagttccccattctgctagcggaaaacagtgaaacctgcattcgagggccatgcatgaagctcttttccagatgaggaaacggaggcccggagaggtagcggcagggtggtggagttgggttgttagcctgctctgtctgcctccaagggtccctgaaccccactggaagggagtggtagctttctacaatgacccacctgttgtgtgcattggaaggctaggagagcctcctcccctgtaggtctcctggtgcaaaaaattcactgcctcaatggtaggaggtgaccagtctggaaacccacctggagagcagaggagacccctaaatcccaccaccccaagtgtctcaggcaaggaggtatctctccccccagatttcacctgccacccctcaccttccccattctcaggggccccgggtaaccatgaccaccaaccattgcacaagtttccagaaagtgaaaatagctcgtaagcagcgcctgctttaaaacactctcaccccgttgcgacagaggctgggatttcctccctccctgcatccttcctcctccccaactacggcagccctggaaacagctgagaggtgtttggtaatccacgaaaagcagaaatacgatttgacaatctgattcattttccgagagtaaatagcctggcctcacttccgctgctgatgaagggtgtgaatgtttttgagcctcctgtaccctctgcgtgcagcttctgcaaaaaccgtcccaagacagaatgttggcccctcgacctggggagatgatccccctttttaaaagctggcctctgcagtgcaggggcagaagaaggactcgcgggtggtttaaaacaatattaagggtctccaggtttccctgttcagcttaaacttagtgatcaagctatttttcttgcttatttgaaaatgtcttccaggtttctcctggaagcttctgagtccagtgaaaggcaaatcgttcacggggctgaagctgtttctgtttcttgcgtgtatgttctgttggagaacagacagaatagaaagtgtgatagttgtacgtttcagtaagagacaccaactcaggcagcgctaggtcataccgactaatccagaaatatcccatcatcatttttttctgcccctttctgacactcaaatgccaatttccatgatcttctgcatctgtgatgctcagtggagagtgacccagtctgggaacatttttggttgtcaactcgggggtgctgctggcatctggtggacagaggtgggtgatgttgctaagcattctgcagtgtacagacagcccccaccacagagaatagcccagctctgaatgtcagcagtgctgaggttgagacatcgcctctggttcctaaaagatcattgctcttatcagcaagaaggtgactctgtgccacgaagcaagctttggtggcaaatgccacccagaaaaaggtacaaagaaaacctcaccctggggccatcttcacctaggattctacaacccaatcccaatgcaagtttttctttctttctttctttctttctttctttctttctttttttttggagacagtctcgctctgttgcccaggctagagtacagtggcacaatctcagctcactgcaacttctgcctcctgggttcaagtaattctcctacctcagcacctcctagtagctggtattacaggcgcgcgccaccaagcccaactaatttttggatttttagtaaagatggggtttcgccatgttggccaggctggtctcgaactcctgacctcaggtgatccacccacctcagcctcccaaagtgctgggattacaggagtgagccaccgcacccaaactctctctctctctctctctttttagagcaggagatttgtggtcactggctgaattacttttcatggctgtgattttcgctatattctttcttttccccaggcaaagttataatcatttgtcgatgctgttttttcccccagttatacatttgtattgtcattttcatggctgcataatattccttttagatatggcaggagttatttatggaaacaagcactgtgggtaaaagggttgaaaagggtgaaggttttattttgtttggtttgagatagggtctcatctgtcacccaggctggagtgcagtggcacaatcactacaatcttgacctcctgggttcaagcaatcctcctgcctcagcctcccgagtagctgggattacaggcatgcatcaccatgcccagctaatttttacatttttttgtacagaggggatctcactatattgcccctcctgggctcaagcaatcctcccgcctcagcctctcaaaatgctgggattaaagatgcagaccaccaagcccagctatggcagggggtgggggagaggtgacagttttgaggggcttattggcatggtgctggggagagatgtaggagctatttttctgctaggcacttcctgtagttctgggggccccagcacccaggcaggctgcagaatgatgtggtgtgaagtgggaggaggaagggggcgttgtcagagggcaagatgtctataggctcacccctgactcagcacccagccctgtcaacacggttgagtcagcacccacgcccggcagccccaggtggagtcccaggaccataggctcaagctgatttgtcaggtgccagggctgggtggctccgattgccccggcctgagctgtgtcagctgtgccagaccagcgagcatcagccttggagctgggcacagcggtggctcatgcctgtaatcccagcactttgggaggccgaggtgtggggatctcttgagccaaggagtttgagaccagcctgggcaacatagagagaccctgtttctgggtgggtggggggcgggggaagagagagagaagagagaaaaaacaaaagacatttggagctgaatcattctccagtgcggggccaccctgtgcactgcagtgttcaacagcatctctggccttcaccgactcaatgccaattaacacccgtcccctggccagacccgggggctcacacctgtaattccagcactttgggagggcaaggcgggtggatcacttgagctcaggagttcgaggccagcctggccaatatggtgaaaccctgtctctacttaaaaaaaaaaaaaattagctgggtgtggtggcaggcgcctataatctctgtcatctcagctacttgggaggctgagtcaggagaatcactggaacctgggaggcggaggttgcactgagctgagatggcgcctgggtgacatagggagagtccatctcaaaaaaaaaaagaaagaaaccctcagatcagccgtgcgactttgcctgcctgtgcctcagtttccttgggtggaaaatgagtttgctgctgtgaaaatgaaatgagacactaaagctcagagcccacccctggggtgtggccagcacagtgagtgtcctctgataaagctggtgtgcctgaattttaaggccccttcctccctctctctccctctccccacaaccctcttcgctcattcattcattcattcacctgttcattcagcagatgctctgtatggcaagcagatatgactcagaatctcaggagtgactctggccgggcgcaatggttcacacctgtaatcccagcactttgggaggccgaggcaggtggatcacctgaggtcaggagttcgagaccagcctggccaacatggtgagaccccgtctctactaaaaacacaaaaattagctgggtatggtggcaggcgcctataatcccagctactcgggaagctgagggacgagaattgcttgaacccgggaggcagaggtttcagtgagctgagatcacaccactgcactccagcctgagagacagagcgagactctgtctcaaaaaaaaaaaaaaaaaaagtgacgtagcctctgggccttgcccagagtcagtgccaaaatgtttgtcgcatgacctaactttgtgctaacggtggaccctgtgactcgagcttgggtgctttcattctgggcaccttcaacaaattatctctttcaacctccccacaagcctgagggttgcctaagcacccccattttctagaggtggaaagtggggttcagagaggggaaggttagctgggggacctggtgcaggtggcagagctgaggcttcaacccaggtctgcctggcctggccaccgcaactcctcctgtgcctagaaacatctgaatgcaccaatgcatcaggtttgccctgtttccctccacacacaggttctaggggttcctggaagccctgctgagttccttctaggcttttgtctaaaaggaactgagaagcccatttgccaggaatatcccagacagggagggacaaggggtcgggaagaggctgggtgaatagggttccctgaggtgccctataagaagttaggaggaggccgggcacagtggctcacgcctgtaatcccagcactttgggaggtcaaggcaggtggatcatttgaggtcaggagttcgagaccagcctggccaacatggtgaaacctcgtctctactaaaaatacaaaaattagcttggagtagtggtgggcacctgtgatcccagctacttgggaggctgaggcaggagaattgcatgaacccgggaggcggaggttgcagtgagccgagatcacaccattgcacactagcctgggcgacagaggaagactccatctcaaaaaaaaaataataataagttaagacgagcctgggggccagacaccatggctcacgcatgtaatcccagcactttgggaggccaaggcaggtggattactggaggtcagaagttcaagatcagcctggccaacatggtgaaaccccatctctactaaaaaaaaaaaaaaaatacagaaattagccgggcgtggtggtgcacacctgtaatcccaggtactcgggaggctaaggcaggagaatcacctgaacccaggaggcagaggttacagtgagccgagattgcaccactgcactccggcctgggcaacagagcaagactctgtttcaaaaaaaaaaaaaaaatgctaaacatggaattgccataggtcccagtgattccattcctaggtatagtcccaagagaaataaaaaccgggacacaaacagatacttgcacacacgtgttcgaggcagcaccatttacatgcgccagacggtggaaacagcccaaatacccatcaactcatgaatcaataaaagtgtggtatatccatatgacccagtggtttttgtgtttgttttttgggataaggtctcgctctgttgcccaggctggagtgcagtggtgcgatcacagctaactgcagcctcgaacccctgggttcaagcaatcctcctgcatcagcctctcgggctggttcttactgggggctcccctgagtgcagagaacaggcccaagctgatgccagttagggaagtcatctctatagttctagaagggatactgagcccaggaggctggagacaggggcctcaccaaccctctgctcgtagcctgagctctttctccagcgtgatttgatctgccccatcaccgtgttcttttctctctcatcccatattttctttctttcattctttctctttattgtgattaaatatacataacataaaattgactgtttttgttttgttttgtttgagacagggtctcactctgttgcccaggctggagtgcagtggtgcgatcacagctcactgcagcctcgacctcctcaggctcacgtgatcctcccgcctcagcctccagagcagctgggactataggagtgtgctactacgcctggctaatttttctattttttgtagagcctgagtctcactgtgttacccaggctggtcgcaaactcctgggctcaaatgaaccatccaccttggcctcccaaaatgctgggattacaagagtgagacattgtgcctggctaaaattcactttttttttttttgtgacagagtcttgctctgtcacccaggctggagtgcagtggcacgatctcggttcactgcaacctcccacctcaagtgattctcctgcctcagcctcccgagtagctgggattacaggcgcacgccagcacagccggctaatttttatattttcagtagagacggggtttcaccatgttggccaatggtctcaaactcctgacctcaggtgatccgccccccttggcctcccaaagtgctaggaatacaggcgtgagccaccacacccagcacaaaattggttatttttaagtgttcagttcagcagcattcacagcattgtgccaccttcaccaccacccatctccagagcttttcccttcttcccaaactgaaactttgatcccattaaacactcacttcccattctccctccccagccactggcccccacccttcttccttctgtctctacaaatttgagcactctgaggacctcctaggagtggaatcatacagtatctgtcctttcctgtagtttatttcactcagcataatgtcttcaagattcatccacgtggtagtgtgtgtcagaatttccttcctttttatgactcagtaatattccattgtgtggaaggaccacattttgtatgtccattcattccttgatgaacacttggtcatttccaccccttggctgctatgaacatgagtgtgcaaatacccattccagcccctgctatcagttttttggggctgtgtccctaacagtggaatggctggatacccttttttactttttactgttagtattttttgagacagagtctcactctctcgcccagcctgcagtgcagtggtgcagtctcagctcactgcaccctctgcctcccgggttcaagtgattctcctgcctcagcctcccaagtaactgggattacaggcgtgcaccacctcacccagctaatttttgtatttttagtagagacgacgtttcaccatgttggccaggctggtctcgaactcctgacctcaagcgatcctcctgcctcggcctcccaaagtgctgagattacaggcgtcagccaacgcgcctggcctgggtatccttttttaaactttattcgtggctgctgataacgctcaaaagagtttttctttccttagcagctcgcctaagagccattgacccaggctgagcatcgtctgcgagcctccctgagagctcagattcacaccagccggcatctgtcgcctcagcctgcaacattctgggcctcgatttcctcttctttgaaatgggggtaacagcgcagagcagtgggagcacggccggtgccctggccttgggggccgcccggaaatcggggttttgcagcagcttgggttgtgcagagaggcagaggctgtcagggagatggacgggcctgaggtggaggtgccgctcacacccggcacacccgccgcctgctcagcccacagcctgctctgcgcagccagctctgcgcagccagctcccctccccacctaggccccggccatctcaagacagcctcctccggaggggacacagactcctgcacaccagacccagagactcttaggccggcgactaaactgaaaagccctcactctgcagggtggggaaactgaggcccgggtatccaaatcctccggcagacagacgccaaccgacctacatgggtcttggggtcttcctgagccacaaacgcaaatcccacaggaggagctggtccctcaggtggggttcctaccagggacatggcttgccaggatttgaccccgttttaacctagaacagccaggtgtgctggctcatacctgtaatcccagcactttgggaggctgaggtgggaggaccacttgaggctgggagtttgagaccagcctggggaacatagcaagaccccatctcttaaaaaaagagcgtggtagcaggcatggtagcatgcatctatagtcccaactactcaggaggctgaggtgggaagatcacttgggcccaggagtttgaggctgcagtgagctatgattgtgccactgcactctgatatgggtgatagagcaagaccctgcctctaataaataaataattatttttataatttattataaaattataaatgttataaaaattaatttaatttaattaaataaaaaaagcaaggtagctcatgcctgtaattctagcactttgggagaccaaggtgagcagatcacttgaggccaggagttcgagaccagcctggccaacatggtgaaaccctgtctctactaaaaatacaaaaaaaaaaaattaagccgggcgcggtggtgtgcaggtatagtcccagctactcgggtggctgaggtatgagaatcacttgaacccaggagatggaggttgcaatgagccacgatcacgccactgcactccagcctgggtgacagagtgagtccctgtctcaaaataagtaaataaataatatcatctagaacgatgtaaacagaacattgcattgacattttgtcaattgccacaaaattgacattttgtcaatggtttgtcattgcaagccattttgttttttctctccccgccatcccccctcctttttctttaaacatggggagtttataaatccatgagacctaacaagcagctataggacactccacacaacagcaggacacactttcttcttgagggtgcaaggaacattccctgggagaggccaaagaataaatccagtgcattgaaaaggatcgcaattctataaagtatgtcctctgaccacaatggaatgaagtgagaaataagaaacagagaggaatttggcaaacttaagaaatatgtagaaattcaagaacgcacttgtaaagacaaggaggacctactctaagattcatcagaaaatcccagcatttgagaccagcctgcgccacatggtgagaccccatccacagaaaaaatacaaaaaatcgccgggcctggtggcgtgcacctgtaatcctagatactcgggaggctgaggtgggaggatcacttgaaacagggaggtagaggctgcagtgagccgcgatcgcatcactgcactccagcctgggcaacagagtgaggccctgtctcaaaaaaaacgaaaagaaaagaaaaaaagaaaaaggccatgtgtagtggcttacacctgtaatcccagcactttgggaggctgaggcaggtgaatcacctgaggtctggagttcgagaccagcctggccaacatggtgaaaccccatctctactaaaaatacaaaaaaaaaaaagacaacacacacacacacacacacacacacacacacacacacacacacaaaacaaactagctgggcatggtggcaggcacctataatcccagctactcaggaggctgaggtaggagaatcgcttgaacccgggaggcggaggttgcagtgagctgagatcgcatcattgcactccagcctgggcaaaaaagcaacactccacctcaaaaaaaaaaaagacaaaaaaacattctagcagtgggaaggtcctttaggggcctaagctcctgagtggggaccagtccggctttgtgcagggactcagtgcacctggggctctctctgcagatatgagatgtgcatgggctcttctggatgttgccctagtgagttctgagggctcctgtgggctcgtagcttctagagtggatgattcccccaagatcactgtggggaacaccaagagtggctgctccccacagcttcaaggctgccagtggggactccactggaggtccgcttctggggggctgccacgtgtccccagctttagtcaggacccctcccacaacagcatcccctgctcccatccacatctccaggtcctccaactcctgtgacccttccccaatcccacatctttgcacaggctgttcctcatggcaaaaagcccttcctgtgtgtccgtggggcagatgccagtccgccccccaaggcctggctccggcatcacctccactgggaagcctgccctgattcccatagaagcaccccagcctgccccgtgccagcttggacctcacagggtgggagcgccagatctgtggctggctcctccttcccactagactgggcagcagcagagaggggtgctgaatgactcgggggacctggttgacaaggggtcaggaccgtgaaggggacagtggttttactcccctgtcatagtcacagagagcaacacacaaaatccaaggattcctgggatgacagaatttctgacctcaaggccaagatgatgctgggtagagtgtgcagcgtgtagtgtagacggggacttggatccgctggccctggctgcctggagatgctgggtagagcacgtagtatgcagcgtagacagcattcagagtccctcagccctggctgcccctacctctgccccttgcccctggccatggccctgggcgcacgcctggccctctctgagccacagctccctcccaccagggctggtgagaaaagtaaaccgagagtgctgtttcctgccaccctgctgggtgctcagcctccctccacccgcatcctctcgagtgggtagaatcccaactgggggccctctggcagggtccgggagctggcacacgagcaggcactctggctcggccatgcatccgtccatgggccactcgccgagacacgtggctctaaatggacacagtcattcaggaaatagcgcctcgcccaccgaatgccaggcgccactcagcaggctgctgtaactccgcaggctgcctcctgaattgccctccactttcaaccttgaccccaggttggcctttctggggactgtcccaagatcgagagacacacttcacagccaagccctcgtctgcagcctcggagctatgagatgttccagctccagggaaaaaactcaggaatcagaagtctggccagccccatcccactcctcttggctttaatgtaactcagaggcaccgatcctggctcttggggcagaattctccacattcctggtgtgtttccgttgaaccccaaaccgcaaacacatcctgacatctcatttcctcaatgtgccctggtggtgactcgggccaccttgccgggagctcgttttgagtcatacagagatttgtcgaaggaagggtttctcatctcagaagttggaggccgttcccaccaacctccctccctgcatctgtacaagaattgctggcggggctgctattccctgatgcttggatctgagctctcagtgactcgggaggcactggccaggggccctggacaaatctaagctcagttccttatgtcaccactgtcaacctcaggcacgggaaggcggctctcagtctctttcctcctctgtagagctgggctcttagcagctatcttggccgggctctatctcaaatggatggaatctgggctatgcctgacacatagtaggtgctcagtgaaggaatggtgcccattagtgagagagggagacagggctgggcatggtgatgtgcacccgtggtcccagctacttaggaggctgaggcagaaggatccctagaggccaggaggtcgagacagcaatgagctatgattgcaccgttgcactccagcctgggcaacagagcaagaccctgtccttaaaataataatagtaataataatttattgaactcctgacctcaggtgatccacccgcctcggccttccaaagtgctgagattacaagcatgagccactgtgcctggctgaataataatcactaaaaaattaatctaaacataatttctaggctgggtgcggtggctcatgcctgtaatcccagcactttgggaggccaaggcgggcagatcacctgaggtcaggattttgaaaccagcctggccaacatggcgaaaccctgtctctaatttaaaaaaaaaagaaaaaaaaaattagcccggtgtggtggtgcatgcctgtagtcccagctgctggggaggctgagaattgtttgaacccaggaggtggacgttgcagtgagttaagatcatgccactacacttcagcctaggcaacagagagagaccctgtctctaaataaataaatgagagagagagagaaaaaaaatccaaggaaacaagcccattcattctacttaattccgctggtctctgggaggcaggttgggggtggagaaattccatgtttttacagaatcctgacgtcaccagcaactgccccaccaggagctaacttcagcacgggcggagggagggtgtctgcccacgacctgaccttgaactgggcctttcttaaatgtaaatgtgcatctcctttggtgcttttttaagtgggagaggtccctgaaaggttgttgcctggaggaaaagttttggcaattaacttttattattgtttgcttgcttaaagaaactgggggcccagagcagtgagtggcttatgcctgtaatcccagcactctgggaagccgaggcgggcagatcacttgagcccaggacttccagaccagcctggccaacaaaaattagccaggcatggtggagtgcacctgtaatcccagctactcgggaggctgaggcagggggatcacttgaacccgggaggcagaggctgcagtgagctaatattgctccactgcactccaacctgctgggcgacagagtgagactgtctcaaaaaacaattgggatgttcatcaaagcactattcataacagccaaaaagtagaaacaacccaagtgtccattagagaatgaataagaaaactgtgatccatacatacaatggaatattattcagccatgaaaaggaatgaagcactgatccatgctacaatgtggatgagcccccaaaacattctgagtgagagaagccagacgcgaaagcccacatagtgtgagattccactgatacaaaatgcccagaacaggcaaatccagagagacaggaagcagatgagtggctgccaggggctgggggaggggaatggggagtggctgctgatggggacagggtctcctcttgggggatgcaaatgttctggaattagacagaggtgatggttgcacaacattgtgaatgcacgaaatgccactaccgtgtacacttcatggttagttttatgttatgtgaatttcagctcaattttaaggtgtaaaaaaagcaattgagaataagttgcttctgttgtaaaacgttactttttttttcagacggagtcttgctctgtcgcccacgctggagtgcagtggtgcaatctcggctaactgcaacctccgcctcccaggttcaggtgattctcctgcctcggcctccccagcagctggaattaccggcgcccgccaccactcccagctaatttttgtatttttagtagagacgggtttcactgtgttggccagaagggtctcaaatgcctgacctcaagtgatccacccaccttggcctcttaaaatgctgggattacaggcatgagccaccatgcgcagccacattactatttttaatacagttattttgtcaatataacataaagtttggaccgagtatccactgatgaatgaatggataaacaaaatgtggtctatccatctatccagacaatggaatagtattcagtttttaaaaagaaagagattatagggccgggcgcggtggctcacgcttgtaatcccaacactttgggaggccgaggcgggcggatcatgaggtcaggagttcgaaactagcctggccaacatggtgaaacccagtctatactaaaaatacaaaaattagctgggcgtggcggtgcgtgcctgtaatcccagctactcgggaggctgaggcaggagaattgtttgaacccaggaggcggaggttgcagtgagccgagatcacgccattacactccagcctgggcagcagtgcaagactacaattcaaaaaaaaaagaaaagaaaagaaaagaaaaagagaaagattctgacacatacatgctccaacaggaactatcctaagtgaaatacgccagacacaaaaagagaaatactgtatgagtccatgcatcagattcatagagacaggaagtagaatggtgggtgcgaggggctgggggaggaggaaatggggaatgagtatttagtgggggcagagtttcagttttacaagctgacaagagctctgctgcgtaacatgaatggactggggtgagccgtgagggctggagggccctcagacaagagaaaggatgacagttccaaggcttcaaacagatgctctgagagaaccagtcctcagaaaggctgagaatccctggaatttttcctgggctggaagggatctgctctatggcttaaaggtcttggccaagggcctgaagaaccacccatcttccagggcccaggcactccgactcctcaaatttaaatacaggcgctttctacgcatgagtgccaaaccatttccagtaagtctcattgtcagctataaaaataaccactgttgaagcagagacaagctcgtgatgcagccaggcagtgccacagagaggcaatggcatctgtccctgtcaaatggaaagtcccctggccaagcctctgaattcaagtgaacatcttggtcttggatgtgaccatctgaatggtggtcgagaaagtgcttggtccatagaaggcacccaggacactcgagcccccttctctcccatgaccttcgtacaatggcacggaatggagacgcagggctgggacttcccctccaccacaccggtttcctttacaatgagattccattcctataatgaggaataatgtagtagcttagttaatacagacagaactgcccctcagtcggttcttgggtagtggagctagaatatacaggccctgctctaaaagctcaaagcaatccctggacagtaaccatagctttaataatactcatctgggccgggtgcggtggctgaagcctggaatcccagcactttgggaggccgaagcgggcaaatcacaaggtcaggagttcgagaccagcctggccaacatagtgaaagcccatctctactaaaaatacaaaaaaattagctgggcttagtggcgggcacctgtaatcccagctgctcgggaggctgaggcaggagaattgcttgaacccgggaggcggaggttacatgagctgagatcgtgccactgcactacagcccaggtgacacagtgagactccatctaaaataataagaataatacccatctgaatgaataataacaaaaaccagtaccactggctaggaggcggaagtggggttatggggaattgctcaatgggtacagagtgtcaatttcacaaaatgagaaagttctagagatctgttgcagaatggtgtgaatatatttaacactgctgaaccacgcacttgaaagtggtttttttaaaaaaaaagtggttaaagtggagctggatgcagtggcatgcacctgtaggcccagttactccagaggccgaggcgggaggattgcttgagcctaggagtttgaatccagcccgggcaacatagtgacaacctgtctctaaaaaaataaaaaaagaataaaaatttctataaattaaaaataaatttaggccaggaatggtggctcacacctgtaaccccaacactttgggaggatcccttgagctcaggagtttgtgaccagcctgcacaaagtagtgagactctatctctagaaaacatacaaaaattagccaggcgtggtgctgcatgcctatagccccggctattcagaaggctgaaatgggaggatcacttgagcccggggtgcgaaggctgcagtgagccgagatcgcaccactgcactccagcctgggcaacagagtgagaccctgtctcaataaataaacacatacataaaataaaataaatgaataattttttttttcctgagacagagttttgctttttcagccagctggagtgcagtggtgcgatctcggctcactgcaagctccgcctcctgggttcacaccattctcctcagcctcccaagtagctgggactacaggtgcccgccaccacacccggctaattttttgtatttttagtagagatggggtttcaccgtgttagccaggatggtcttgatctcctgacctcatgatccacctgcctcggcctcccaaagtgctgggattacaggtgtgagccaccacacccggctgaataaatttttaaatggttaaaatggtaagtttcatgttttttatcataattaatattttttttttttgagacagagtcttgctctgtcacccaggctggagtgcagtggcacaatctttgctcactgcaacctgcacctcccaggttcaagcgattttcgttcctcagctcccaagcagttgggattacaggtgtgtgccaccacaccccactaattcttgtatttttagtagagacggggtttctccagattggccaggctggtctcaaacttctggcctcaagtgattctcctgcctaggccacccaaagtgctaggattacaggtgtgagccactgagcttggccataattaaaaatttttaattaaaaaaaaaaaaatccagccgggcgcggtggctcacgcctgtaataccagcactttgggaggccaaggcgggtggatcatgaggtcaggagatcgagaccatcctggctaacatggtgaaaccccgtctctactaaaaatacaaaaaattagccaggcatggtggcgggcacctgtagtcccagctactcaggaggctgaggcaggagaatggcgtgaacctgggaggcggagggagcttgcagtaagccgagatcacgccactgcactccagcctgggcaacagagtgagactccatctcaaacaaaacaaaacaaaacaaaaaaaccactactactgtttctactactttacttgaacatctagaatatgccctgagggatagctgttatacctccatttttttttttctagacggagtctcagtctgtcttgaccaggctggagtgcagtggtgtgatctcagctcactgtagcctccgcctcccaggttcagcaattctcccacctcagcctcctgagtaattgggattacagtcacccgccaccacatccagctaatttttgtatttttagtagagacagggtttcaccatgttggccagcctggtcttgaactcctgacctcaggtgatccacctgcctcggcctcccacggtactgggattacaggcatgagccactgtgcccggccaatgacctctattttatagatgaagaaaaatggggactccaagtagtgatttgagcaacccaaggtcacactctccaggggtgaagctgtcttcacaccaactctgacttaaggctgtgccttttccaagatgtttgttgcccctccatggcttcaacatcttctctggtctacctcaggggaagagaagccacaggtatcttgctccaggatctagaaccggaaaataaaccagggttctggtccaccatattgttctcttagaactaggatcctcatttcctttaaaaagtgtgtttacagttgaacaattgctacatcttgtcttgagtctttttttggctctcgtagtggaaattctgccctttgtccttagtacaaagaaataatgttcatcacagaccaggatctcaaagtccttgtttctggcctcagaaagcgttctctctcccaagtgaaggttaatataggaataacaatggaaagtcacagaattgctcgtttattaaactagtgtttcttgcaatggtgttttaaaagtttataagagatatattattgatatataacatattgatataattacacattgttgatatatttttgagacattatattaggggagttttttgttgtttttagagttggggtcttgctctgtcgcccaggctggagagcagtggtgccatcgtagctcacctcagcctcgaactcctggcctcaagtgatccttctgcctcagcctcccaaagtgctgggattacaggcatgaaccattgtgcccggcctgtacattagtgttatttgaactaggatttcccccttaactatgaaattaaggttatcaagagtgagcaaaatattttaaataaagatgaggctcataagataatgtttattcaatttttctttttttattatctgagatcctaaaatatgtgtctttttggagacttgaataatcatcttaagggcttttagagctagaaaggtcttcactgggccgggcgcagcggctcacacctgtaatcccagcactttgggaggccaaggcaggcagatcacttgagaccagcctgagaccagcctgagagcagtttgagaccagcctggccaacatggtgaaaccccgtctctaccaaaaatacaaaaattagccgggcatggtggtgggtgcttgtaatcccagctactcaggaggctgaggcaggagaatcacttgaacccgggaggcagaggttgcagtgagccaagactgtgccactgggtgacagagtgacactctgtctcaaaaaaaaaaaaaggaaaaaagaaaggtcttcactggttgtctggtccaacctccttggccaaataagaaaactgaggtgcactgaggttaggtccaaggtcatgaatagagagcacccctgcacgtcagtcagaaaggaaatcaggctgggcacagaggccacgcctgtaatcccagcactttgggaggctgagtcaggaggattgcttgaggtcaggagttccagaccagcatgggcaacatagagagacctcatctctatgaataatttttttttttttgaggcagtctcaccctgttgcccaggctggagtgcagtggtgcgatatcggctcactgcaacctttgcctcctgattcaagcgattctcctgcctcagcctcccaagtagctgggactacaggcacccgccaccatgcccagctcatttttttgtattttcagtagagaccgggtttcaccgtgttggtcaggctggtcttgaactcctgacctcacatgattcacccgcctcggcttcccaaaatgctgggattacaggtgtaagccaccatgcctggccaatttttaaaaagtagctgggcatggtggcacatgcctgtggttccagttactcaggaggctgaggtaggaggatggcctgagcccaggaggtcgaggctgcagtgagctatgatcacaccactgcactccagcctgggcaacagagcaagatcctatccccaaaacaaaacaaaaccaggaagcaaatcaaggagtgatatttaaagacccactcggctgggcgcagtggctcttgcctgcaatcccagcactttgtgaggctgaggtgggcagatcacctgaggtcaggtgttcgagaccagcctggccaacatggtgaaaccccatcttcactaaaaataaacaaaattagcccggcgtggtggtgggtgcctataatttcagctactcggggagctgaggcagaattgcttgaacctgggaggtggaggttgcagggagctgagatcacaccattgcaccccagcctaggcaccaagagcataactgtctcaaaataataataataataataataataatgataataataataatataataaaaataaagaccactcaacgtaaacacgactctacccaggcaagcccacatcacgtcatctctttggaataagcttgcgataaccatcatatttccatttccttttatatttttccaaaaacagctcatgatacaatttgtacaggtcctagtaactttggggaaaattttggaaaaaaaaaagtagcatgtttcaaaggaacttgatctgataagaggcagaaatattgactccattatttcaagaggcagtttctttgtttcccagacgcttcctgacagttttaaaaatagccttccacaactgttccaggatgagaatgtccttttacataaaatgggctttgaagatgtgatttcatttactcagaggaggctgtagatcattcgtcatccttttccaaaacatggcttggaccgggcaatgtgggcccttgaattccagttgaacaccagtccaaactgggttgttggatgcggagaagataaagggtacccacaaagaggacacggctcgttacaatctgggagacaaaacgcaatggggttgcagtcaaaagttgcctcttgcgaccaggtgtggtggctcacgcctgtaatcccagcacttcgggaggctgaggcaggtggatcacctgaggtcaggagttcgagaccagcctgggcaatatggcaaaactccatctctaccaaaaaatacagaaattacccgggcatggtggtatgtgcctgtagttccagctcaagaggctaaggcaggagaatcgcttgtacccaggatgtgaaggctgcagtgagctgagatcatgccactgcactccaggctggctgacagagcgagactctgcctctaaaagaaaaaaaaaaaaagttgcctctttcggatgggtgtgtcggctcacccctgtcatcccagcactttgggaggctgaggctggaggattgctttaggccaggagtttgagaccagcctgggcaacatagcgagaccccatctctacaaaaaaaaaatttaattacctgggcatggtggtgcacacctgtagtcccagctacttgggaggctgaggtgggaggatcacttgagcccaggaggttgaggatgcagtgaactatgatcgcaaccaccgcacttcagcctgggtgacagagtaaggccctttctctaaaaataaagaaacaaaaataaaatgaaagttgcctcttgtctgctgtattggaggtttctgtatctgctgattcaaccaaccctagatcgaaactacttgaaaaggggccgggggcggtggctcacgcttgtaatcccagcactttgggaggccaaggcgggtggatcacctgaggttgggagttcgagaccagcctggccaacacagtgaaaccccgtctctactaaaagtataaaaattagccaggcatggtggcgggtgcctgtaatcccagctacttgggaggccaaggcaggagaatcacttgaacccaggaggcagaggttacagtgagcggagattgcgccactgcactccagcctgggtgacaagagagagactctgtctcaaaaaaaaaaaaaagaggcagggcgcggtggctcacgcctctaatcccagcactttgggaggccaaggcaggcagatcacgaggtcaggagatcgagaccatcttggccaacatggtgaaaccccatctctactaaaatacaaaaaattagccgggcatggtggcaggtgcctgtaatcccagctatttgggaggctgaggcaggggaatcgcttgaacccaggaggtggaggttgcagtgagctgagatcgcgccactgcactccagcctggagacagagcaaggctccatctcaaaaaaaaaaaaaaaaaaaaagagagagagagagagaaagaaaccatttgaaaaaaaacaatcaaaagttgcctcttatgtgaaagatctgatggctaggaggggtcattgttcattttctcagacgtgaccttggcatcgagtatacgttagcatgtcagtcgccacacgtctcagtgacgtgcgcttcagggcacgtgggcgaaatggcatcctgactccaacttgctctaaagtgcttctccagagcaaaggaagacagccatgcggcaaaggtggaaaatctggatgacagttgacgctgggtgggggtgtttactgtccttttctcttcaactattatgtttggaaattttcatcatacatttgttccaattggatactctattcttcaggaaagggcgtgagtgtcctttgccgtggaagagactgccaatgggagaggggatggatttgtggatttgatgttgattatttacacagcaggggagtgtgtgtgtgtgtgtgtgtgtgtgtagcagggaaggaaggaaacaggatttgagactggcttctaactttttaaagggtctgaggacctctttaaaaatcagatggaggctgggcacagtggctcacacctgtcatcagcagcactttgggaggccgaagcgggagggtcacttggggccaggagttggagatcagcctggccaacatagtgagaccctgtttctataaaaataaaaataaaataaaaattaaaaaaaattagccagggccgggcacggtggctcatgcctgtaatcccagcactttgggaggctgaggtgggcagatcaagaggtcagtagatcgagaccatcctggctaacacggtgaaaccccgtctctactaaaaatacaaaaaaatttgctgggcgtggtggcgggcgcctgtagtcccagctactcaggaggctgaggcaggagaatggcgtgaacccgggaggcggagcttgcagtgagccgagatcgtgccactgccctccagactgggtgacagagcgagactccgtctcaaaaaaaaaaaaaaaaaaaaaaaaaaaaaaaattagccggatgtggtcagctactcaggaggctgaggcaggaggatcacttgagcccaggagttcaaggctgcagtgggctatgattgcgccatgcactccagcctgggtgagagagcgagacccccatctcttaaaaaaggggaaaaaaaaagataaaaagttatgaacactgcaaacccacatacaataaaaaacaaaccagggctgggtgcggtggctcatgcctgtaatcccagcactttgggagtctgaagcaggcgaatcacgaggtcaagagatcgagaccatcctagccaacatggtgaaacctcatctctaataaaaatacaaaaattagccaggcatggcggcgtgtgcctgtagtcccagctacttgggaggctgaggcaggagaatcacttgaacccaggaggtagaggttgcagtgagctgagatcacgccactgcactccagcctggtgacaaagcaagactccgattcaaaaaaaaaaaaaaaaaaaaaagaacaaaaacaaaaaaccagcaaatgtgcattcaggggttcactgctttccctaaaaacgtcccctcccctgggtaagagctcctaattcaatacatggttttccatttctaagatatcaagagccatcacctgcctcttctgggtacggtgaatatgcaaataagcagaagacaacaagaaactagaaaccctgaagttttctaagaaaccctcaattcttttctcaaatcagcaaaacgagcctccgcccctggctggcttcggagctctgggcaaatgactgcagggaatgagtctcagttttccctcaggaaaatgggctaacatccaccctcttcatttacaaggttgctttgagtttccaacaagataatggaagctgaatcgctgtgaaaattgtgaagtcccaaaccaaatggtgccaaagctgtgactaccctggagagaggtgactcagcgccttctccaaagggatctatcacggcagaagcacatggcttgggaccttcagattcactctggggttttcctgcaggaggaaggaagtattgggaattgcctccggccatgaccactttcaggaagctgctcgtttttgcagagaagattaggggcatctcagaggttacaaagcccacgaggccccaccaggccccaatccacaaagcaggcccattccatgggcaccaagaagacgtcccctcccaacaccctcatctccaggactgcagggacccctcgagggtctgtaacctggaaaagggggattaccaaaggtttggaatctttacattcgcccaaatccaccataaacttcagtttatggtttatagatgacccttgaacaacacaggtttgaactgggtgggttcagtcatatgtggattttctttgttttgagcccgagtctcactcttgttgcccaggctggagtgcagtggtgcgatctcagcccactgcaacctccgcctcccgggttcaagtgactctcctgcctcagcctccctaatagctaggattacaggcatctgccacgacacccagctaatttttgtatttttagtagagacggggttttaccatgttggccaggctggtctcgaactcctgacctcaggtgatccactcgcctcagcctcctgaagtgctggaattacaggcatgagccactgtgccctgcctgtatgtggattttcttccacctctgccaccccaagaccaacccttcctcctcctcctcctcgggttactcaatgggaagatgatgaggaagaagacctttatgatgatccacttccacttaatggatggccaatattttttctcttccttttcctgaggattttctttttttgtttttggagatggagtctcgctctgttgcccaggctagactgcagtggcacgatcttggctcactgcaacctctgcctcccaggttcaagcgatcctccttgtctcagcctcctgagtagctgggattacaggtgcctgtcaccacgcctggctaattttttgtatttttagtagagatggggtttcaccacattggccaggctggtctcgaattcctggcctcaagttatcctcccacctcggcctcccaaagtgctgggattacaggcatgagccactgctcctggccttttttttttttttttttttttttttgagacagagtcttgctctgtcaccaggttggagtgcagtggcacgatctcggctcattgcaacttctgcctcccgggttcaagccactctcctgcctcagcctcccgagtagctgggattacaggtgcccactaccatgcccagctaatttttgtatttttagtagagacggggtttcactgtgttggccaggatggtctcaatctcctgacctcttgatccacctgccttggcctcccaaagtgctgggattacaggcgttagccaccacgcccggccctgtattttcaatctcatgaattactgccctgagacgagtctatgtaacaaaatatctgaggctgaaaaactgctttttaaaaataaatctacctgaggccaggagtttgagactagcctggccaacatggcaaaaccccatctctactaaaaatacaaaaaattagccaggcatgttgcctaatgcctgtaattccagctacttgggaggctgagacaggagaattgcttgaacttgggaggtggaggctgcagcgagctgagatcacaccattgtactccagcttgggtgacaagagtgaaactctgtcccaaaataaaataaaataataaataaaaataaatctatgtccagtggatccaggtcaacaccagccttctaagtcatgttgatgacatggatctttgatgtgatttgatgtcaatacacttcatctctgtggtcttcctcccccaagtccagctccacatctagtcacgggaaaaacatcagacaaatcccagtggagggacattctacaaagcacctgaccagttctccttgtaactgtcatcaaaaacacacaacgtttgagaaactcacacagcccagagaattcttttttttttccttgagacaagagtctcactctgtcgcccaggctggagtgcagcggtgtgatctcggctcactgcaacctctgccccccgggttccagcgattctcctgcctcagcctcctgagtagctgggattacaagcgcctgccactgcgcccggctaatttttctatttttagtagagacggggttccacccagcccagagaattctaacgagatgtaaggtctgaatgtcatgggggatcctgggacagaaaaaggacattagggggaaaaacgaattttttttttttgacagggtcttactctgtggcccagactggagtgcagaggtgcgatcttggcccaccacaacctccacctcccaggttcaagcgattctcctgcgtcagtctcccgagtagctgggattacaggcatgctccactaccacccggctattttttgtgtatttttagtagagacggggtttcaccatgttggccaggctggtcttgaactcctgacctcaaatgatccacctgcctcggcctcccaaatggctgggattacaggtgtgagccaccgtgccctacctgcatttttttttttagacggtgtctttcttgtcgcctgggccagagtgcaatggcatgatattggctcactgcaactccacctcctgagtttcaagtgattctcctgcctcagcctctcgagtagctgggattacaagtgcgcaccaccacgcgcggctaatttttgtgttgtttttttttagtagagacagggtttcactatgttggccaggctggtccccaactcctgacctcaagtgatcccccccacctcggcctcccaaagtgctggaattacaggcatgagccaccgcactcagccaaaaaaacagagcaattctgaataaagtaaggactctagttaataataatgaatccgtattggttcattaattgggatgtaagtaatgtgtaatgtaagatgttaaaaataaggtaaactctctaaggggcttatgggaacccttcgtattttctttgcgatctttctgcaaatttaaaactggccaggcacagtggcacatgtctgtaatcccagccctttgggaggctgaagtgggaggatcacttgagcccggggaagtggaggttgcagtgagctgagatcacaccactgcactccaccctgggtgacagagctcagaccctgtttcaaaaaaaaattttttttaaggataaattgtctaaggggcttatgggaactctttgtatctttgtgatttttctgcaggtttaaaactgtcctaaaaaataaagttggttaaaacataaaaatgggcagggcttggtggctcacgcctgtaatcccagcactttgggatgctgagacaggagaattgtgtgagtcaaggagtttgagaccagcctgggcaacatggcaagatctcatctcttaaaaaaaaattttttttaaaagtaaaaacttaagatttaaagagcaatgttccacctggttgatctgcttcctgatacccatgcagggaaaacaatgtttacagagattaaagaagcttctcttgttttgtattaaaatattttatattaatcattcaaacttcattttatacaacgagtgcatacaccactgggggagtgtctgactgatgcgtgggagggcgggtggggatgtctgcagctatgagtagggaggaggcggggaagccctgggtgcttcctctcctcgactgaccgctgtgtgttcgtccccagaggaagagcgggaggcagtcagccccgggggggatggcacagtggagagacggacctgcagaagtggtggccaaggcctctgtaagggcttccccaggagatgtgacctttccaggtcttgcagccgagtctgctcaccctgaacaagcccccgagtcccggtccttggagtacggtggcgacggtgtgtgtgtgtatatatagacatctgcactgccccctctctggaacccgcccgtgccctgtcccgcctacacacggccctcgcctaggcggcaggcatgtcagccttgctgagcgcgatggccagttccaggtcctcctgctcctgccgccgcagccgcgccagcctctcctgttccgccttctcgctctcccgcttggcccacgccagctgctgctcctcattgccaaactgcaaaggaaaaacggagagtgggtgatgtggccctggggctgggacctgcaagctggagggaggcagggaatgcgtgggaggggtcagggtcctgcccaccgcccagcggagggtccgatgtgcaggggataagcatgtcttggctgggcccagtgggcgtgcgagcctgtctcaggccccccatctggaaagcagagtggacgggatgcatgtgattgagtgtgaccttaaccatgacctctgggcctcaaagaaaccagccaccccgccccacgcagagaagtgaggatgggcccttgacgctggtggccaagaggtgcaaagatggggaacttccagcgtgcatggctctaaagccccacggcgcagacaattctgcactctgggaatgtggtatttctacctccagccatgctccagagagctctgagaccctctgagggtcattttctttttctttttctttttttttttttgagatggagtctcgctctgtcgccaggctggagtgcaatggcgcgatctcggctcattgcaacattcacctcccaggttcaagggattctcttgcctcagccccctgagtagctgggattacaggcatgcgctaccatgcccagctaatttttgtatgtttcgtagagacggggtttcaccatgttggtcaggctggtcttgaactcctgaccttgtgatccacccgcctcagcctcccaaagtgctgggattacaggcgtgagccaccgcacccggctctgagggtcaatttctcccagaacactgacaaaaggtgtggcacttacactgccatttagtcaagtttttatccgtggggtgtttttctaaaatgttcagttaaaataaaaacttaaaaaagggagaaaaccatcttgatgctgagataggtgatttcaaacaactcaaagtactttagtcatgaaaagaaaagccacatcccacaagctcctcccccagggtgggtcccaatgtcccagacttccctgagaggtcactggcatcatcggccccctcaggaaagctgctgctgcttagggattcaaaggattcccttattaatgtctctctgcgatgcactgcctctgaccagctctctgctcaacactggagtaacaccaaagataacatgcgcagtggctcttccccaggcacccttgggagcagaaatatacaaacaatcccagaacgatccaggacccaaggacccaggctctcgaggagggccctgcagactaacccaggaaggtgggggaaagaagcacacaggaacactcacggcctctccaccacacgcagcactaggtctgcgtgacaacctgggggtgggcccgctgtcatctcatccctctgacagctggggacactgaggccagggaaggggtggctcacactctagactttttcccccccaggcctgtggggagcaggatactaggtgaaactgacagggaggatgcgtccctgcgaggttctgggtgtgaggctcagtgcccgaccttggggtagccaggatgaagcgtggggtgggataagccagactgaggaggggctcgtgggccccaggaaggagctgggatttccccgtggaggctccttgggcgagcgagttgggtgatcagattggcagcgtctggatatttcacggcttgatggtggcatgagcgggaagcaggagagaggagggccagatggcagggctggggggactgggcaaggtgcaggagcagataaatgcaaggaacctggttgggaggcagatgtggcagtgagggggatgcggggccctggaggcctccctctagctggcctcaggacccagatgggggacaggcggagtgtcagtatcaagaaaagatgtccctgggaggaagggctgagtcttgacttcttaaagaggcactgcccagctaaacacttgggggtctgatgagtctccaggtcggactccctccccgccattgtgtcactgccaggggcacagataagcatcccccccgccccagtttggggaattttccaacacctcatggggagaaaaacaaggaaaaaccaacaagtgcaggtggaaattattccatggtgctgctgacaacagtgggagggagacagtgcagctgacggggacctcaccctccaccagccttgaggacagggtgggtgggagctgacagtaatgttcgcctggatccaaatcaaagcctggaacgaccaagtaaccggcctgctgggtctgaaccacagccctctggccgcctttggccccactgagcccccgtgtcacagtgtcactgaagcgccttcccttgacgggtctgtgtttccaaatgaaaggtgtcagcaggaaagttcctggtgccttcagagtcgaccggttcaaggccagctcacgaatccactgtggagacttgcattggtgaggtctgtatgcacttaggaggcacgctgggctgtgaggcctgggagagctctcctgaaaggggactccgcagctccctctgtgtctgctgtcttagccctggacggggccaccttctagttctcgtatctgggtgggtcacacgggccagaatctggatgtctgtggccgatgcaaaaccaatagtggctgggaaacacactggctctgatttctgcttccctctggcattaccatggaaccgagacaccgtaggggcatgacaccaccctagccgaggcctgcccactcaggatggggttcattttcagaagcaaataagtggttcatttcagcagcctcttggaaatccgcagtttagacagctcggcacgctgggcgatgggatggccccgggaggcgcccggcacctgtcctcactggcgctccaaggtgtctgatggcacttccaccccaccatgtgcaggacatgcctagccacttcccattcattcatttaccgacaatgaaattgtatccaactccttcaataattcgaagcacggcctagctgatctggtatttgcactactcttaatgcgaacttccaaaagaaccgttccgctaacctagaaatgccacttcctaatacacacatttgcctgagacagaaaggcctgcttttaaagaaataccagagagggaagaggtttcccgggaacagccacacacgcaaataacccattgatggaaatttggggtttgtaaattagagggttctggagaggcaccgccggggcaccacctccacaagtgaggtgcgggtgacctgggcccccctgactgccagcatggactgggctgctcctgcacaggtaaaaacatgccctgaacagcagtctcagaacgtccacgctgaaagagtcacgctgccaatctgccgggcagtcagacagccctcttggcatttgctcagggaagtggaatcattcaaaccagaggaagcagctgtgccctcttctaagttagcacaaatagtcaagatccagtgaacccagaaaccaccagctgatcggctgagcccccgaatgccgtgaacatggagagacgtcatcttgagtccccagaggagagctggttatggatgattttagacaatgatacgacccaaggggacaaacaaaaacaattaagggtcctgtcttcactcaacccatcccttcagagtggctgaagtacactatctgatcatttcctctggaaaaaaactggggtatttgcagtgggaaaagtgattttaaacagaaaacaggccgggcacaggggctcatgcctgtaatcccaacactttgggagcctgaggcagaaggatcatttgagcccagagttcaaagaccagactgggtagtaaagtgagaccttgtctctatcagaacattttaaaattagccagatgtggtggtgcgcgcctgaggtcccagctacgtgggaggctgaggtgggacgattgcttgagcccaggaggtcaaggctgcagtgaagctgtgactgcaccactgcattctagcctgggcaacagagcgagactcatctccaaatatgtaaaaaccaaaaacttagggaaaaaaaaaaaaaaaacagaaaacaacagggctgcatccaggcctgggtggaatttgctttcccaccaggagatgagggtgataaaatggctggcgctattttaaaactgaagttaacaattgttctggaactaccagaaatgctaagccaaatgataccttgaaaccttgggtgttttttttttttttatgcttttcgaaaaaacgagccctttgcgggttggggtcacaggaaatagaattatgaatttcagaaagagaacagtcatttcttcaagctgccgttcaccccacttacctaactcttccctacccaagacagagtacctgagtcatgtgtgaagagttctgttttttttaaatcagcgtttaatatttttccaccagaaaataaatgaagggctattcaagaaactctagataaagcaggttttgtttctggcttttattaacaatgtcaccattttgtatagacccccagtgcgcatctagggtcaacaaaatcaaactcactgccgttgtaaaatatttataggtcaccaagagccagaaacaggtcagggtcttgggcgatttaaataagccacatgggccagtcacgtgtaaccccagtacttcaaggtgggaggatcgcttgaggccaggagttccagaccagcccaggcaacacagcaagaccctacctctacaaaaaaaaaaaattaaacattagccttgcgtggtgttgcacgcctgtcgtcccagctactcaggaggccaagacaggaggatcgcttgagcccaggaattcgaggttacaagtgagctctgatcgcgccaatgcagaccaggctgggcaacacagcgagaccctgtcactaaaataaataaattgacaaataagccataggatagctgtgcacggtagagattatcaagacggctcagaaacaaatcgggtgctttctgtgcattgacatggcagggctgtgttcaaagagccatcccaggagtcgaagcatctataaataacacatctcacacctaatgatgaaggaactaacaagcccaaaggaagaaagcgagggcatcacacatagtgaaaccaattctgggaagacaacacctgaagctttcagagaacaagattttcatgtatcaaggaagctgctaaaaactccttgaagcgacggcatgttacaatctggaatattttttcacacagagaaaaacaaagccaggctttcgaaatcccgagatttgcttccgaaaaggcacttaactttgctcaacagttttttggagctctttttgttttggctttcagagtggctgttctagactggatttcttttttcattggagctggtaactgaaatttaaaagctttaaaaaaaaaaaacttcaaattgctcttccctggcgcgatctgcctgaagtccttcaatttgcacttgtggcacaaaatgcatggggcgggactgtgagaacttgtgcacaaagggctttttggggacagcagaaccctaatgtaactttcgcaatcttcttttcatacttcggaagtgtttgacatcttggcttccaaaaaccagtgaacacaacagcctcggtgcgtcagaaataatacaatgaatctaccgtgaaggacagataggtcccgcctccctgctggaagaaaacgtgcccttatgatagagcatccaaactgcggctctttttttttttattgagaaactgtttttcttacagaagtggcagtgtagaataaataacgcgagggacagagagtgtgaggtaccaagaggctaaagaagctgggaggtttgcctttaaaaggagacaaaaatcccagggaagctgcaagcggaagggagtggggtggcccggaggcggaggactcaacttacagaggtgaagtctgcaaagcccgaggcagaggccttagaaggtttagctgcagaggaggggacaaatgggtcttttccactaaacgggtccccaaacccctttttactttggaacgggtcgccgctgtcagccccgagtggctggaatggatcgggggcctcgggaaagtctgcggaaccaagctggcttacaggtgtacttttacctggaaagtttaggagaaaaaaaaaaggagaaagaaagaaatatgagttactcacccggacagagcagaatgctggtgggcacaagcccggggcgcttctctgagaaaagcttgtaacttggctaacaggctggacgggggtaccctggggaatcccagttttaatcagctttatcccaggggcttaacgggttgtgaacaacacaggaaaaacacttcagatgactcccatacacaacgcacacagagcagctaaaacttgagttgtcctagaatagtttgcatgcaggtacgtttcaaacagattcattttagcatggcaacacatttattaacatactaatttaaaaaatcatggctgagcagaaaaatacactgcaagcttctaacagtaaaaaaaaaaaaaggcagaggggagagttacttgcaaatgaaaaggaggaattagtttcacaacgtggtatggttattcggtgtgttagttataagggtctgcacacagctctgccatgctgaggtttaagttcttttttttttttttttttttttttttttcagagacagagtcttgctctgtcacctgggctgaaatgcagtggtgcaatcatggcttattgcggccttggcctccagggctcaagcgatcctcccacctcagcctcctacaggcatgagccaccatgcgtggctaatttttgtatttttagtagagatgggattttgccatgttgcccaggctagcctcaaactcctgccctcaagtcatctgcccgcctcagcctcccaaagtgctgggattacaggcatgagccactgcacctggccttaagttcttttttagcccccacttctgtccctctggtgttggtggctccaaggggcagcgtttatctgggcctttctgggcttctgccaagcagggaactccaggatgcccggtcccagcaaggtatatcttgacagggaggtgagagagaagtgttcagaaatggaggaaaatgacactgtgtgggggacatggcctgaggatggtagcttttcccagtgcatcctgccaatgtaccagaacattccaccaagaagcagaggcctgttaagatctgcttggtgacgggaggtcccacctgacgggccttccagcatctgcagtttgcaggccagccgggctgactccatgctcctgacacccctctatctgcccaacggagtccctgggcattcaacgtggtccacgcagcaccccagactggaagctcaataatatgcaacacgattccggcgtgttaactctggaagtttcgaagctaatgtttagaaaaaaccaggaactgcctgtccctccagggttgaccttggatctctggctgcacctccagagagcaccctggctcccagccacacctgccccgcccaccacctgagcctgggacacctgccttcctcatccggtagaacgagcccacacaggccagcctcggtccctctccatgcccagatctaaagcctttccctctgttcccccagcagatcagccatcccaggcctcatttttgaggccccaggtgtccttgtgggctccggggctacagcccccatctgccacctttagctctgggcctcggcaagggaaagtgcctcctcccagctggcctccgtttccttatctgtgaagtggaaatgagaaggagggcgccaaacaaggtgacattcctggggtccaggagtctcctcccactcagtgtcctgcaccgccgtgcccagcataggccagtgagaacctggcccgtagcccccccttgcctgtagccctacttctggaaatggaaattcacttttctctcaaccggcagttctgggccagcataaggactgctgctttctttttgcatattcaaggaaaaacagtcttccttcccacggtttgcacagaaggactcggagacaaactcccctgcagcccacccttgcggcctgcctgtccgcctctgcccgtcccacagggttccaccggggtcgccgttgcatccttagctgacctctggccaccagctgcgggagatccttccagactccttgtctgtgtgagtccatctaagaggctcctcctcagggttggagggcgagctgtcctgggctctattaggactcacatggatgagaaagaggggaggtcgaggcctggtatcagtctcctcctgtggcctcaaatcaattcactgtcagacccaaggcccagttagcagagggggccctgcaatctggaaggggcctatctttgccaaaacttgtgggcaagccatgctggagacccttccctagaggggcagtgcccagcccacgcgggcaggacaggaatgtggcccctctccttccgacagcgcctgccctctcagggcagtccccacacccgagctttctaggtgtctccctttttctatccccagatgtccctcccaccttcagctctactgcggcctcctcctaccccgacctccccggggctgcagagagcagggtgatctggcccagcccgcagaccccgggctggttccgctggccttgaggaactgcctcacacccccaccttgagacggcctcccatgcagggccactcctggtcccaggcatgagccaatggtaagccaaggcctcgctgccaggtctcccggagttgccccgttccctctcctaagggacgggcaggcagctctggcgggcgggggtcaagtgaggcctgcccagcctcctgtgagccccaggctgtccactggagcagaaggggctccctagggctcctgagcaggatggagggtgggcgagggcccctcacctccaccctcccgtccctagaagcctcatctccctatcggccgcccaccagctcggctcccttccctgtgagccaaacccacccagcaaagtggcctcaacacaggtgggccccagcaccctgcccagactgcttgagggcttctcccgcttggggatgacaccccagtcttgtccaggtggcacctccttccccaggaacccccaaacccagggcttctttcctggctatgccttgtccctctgcctggaaggcactcccaactggaatgccatcacaggcagtggccttctcagggaagaaatggcagccccttccccatcatgcctgtgttcagctctgcagccaagccctggggctgggagtggccctggaagacggtgtggggcatggcggccacccccctcagcctgtttcttaatccaaacaaagggctgtgtccccccaacaattgttcatacgttcaagtcctaacccctgtgccttagaatataaccatacttgaagatagcatatttaaaggggtaactgagttaaaacgaagtcaaaggatcaatgactgtcttcactgaaagaacttaggacacagatctacacacagaacagcaatgtgaagatgcaccaggccaaggagaggtctcagaagaaaccaaccccactggcgccttgatcttggactttgagcctctagaactgcgggacaatccatgtctgctgtttaggctgagatagagcaagtgtgagcagggagccaccaaagccaccggcaggggcaccctgggggacagtgtgacagtgtcctgcaccccagcctgtgggtttgcaggggatagggacagtgacctcagccagtccctcgagcccctgcctgcttctgcccagcttctccctccacgggaaagccccccctcccccagggtccctcaccactctgcttcccgtggcactggcctctggcacggctgagggtcagctctgtgaaaagcgggcccagcataccacaaatgccagccaatactgccccatgtccctggtgccctccagcccagggctcggcacacagtgggcttcaggaggtcctggtgaaccaggtgccacctgttacagattccacgggtctccagggacctggggccctttggagcaacaccctggggagcgagaagggaataaaggcatctgcccttcctggtttgcaggaaacagcaatgttactgtgcatgcttgggtatttgatttttcctcgaatacctatgtgatatggatcaaatagcaagattctagcagaggaaacagttaagtgtttccaggggagaagctcaaagtcccaggacacggtgtagccccctgggacgggcagcaagtccagggtggacactgcttgatttctcgaagccgttcctgcagggagtgatcacctgaggcagatttgcaagaatgtggagggaggtgtaaagggaggacgccccagccaggcccccaagagcgactgccacggtacagaaggttcaaataaatcagtcatttttgagctgcttttcttcttcttttcaatgaagatcttcctcccttggtttggggggtttaaaaaaaagaaattggtttttgggaggagcggttaagaattctgcctgctaccatttcaagctgaggtttctgatgcgcaaagagatgttcagagagatgaaaagcttcgttcacaccaagaactgcctgtgcctggttttgctctgttgccgaaaccgttgttatttagaaatcatgactatggtaatatgaaaccagggcacatcaactgctggcctcttgttttcagaaggaacatcaacaacaacaacggtttttttctcagttgttagtgtttgtgctttggtaagagaggagattttggacctgacacgtgtgaggtcagccgagtgcccggtccagctctcgaccttgctaatgaccagacgctttgagcaaagaaagcccccggcatcactgtagggccacggccctcagcccaaacttcccacttttgctcagcgatttatttttagcggctgtatttttcaaaccttctaggtctagttcctgcttttatgtaaccacttctgctaactccttaatcgttttttccgattttgtgaggtatagcttatctcaaacgtgacaaagtaactttaatctgcctccaggccctgaagcaaaagctgccacgcgcacccacgccagggttttatacttttttatggctccagaaaacatgagtaaggagagagctttactgacgcgcatttcagaaaaggggatggaaatcatgaaaacaaaacccaaaaaagtgggtatagaaacatctgggaatgatggcatcaaaccaggtgccaggcatcatcctggcacctggttcgatgccatcaatcctagatatttgcagcgggaactaccggggaccacagcagacggcagtgaataaagacaaatgaaattaaagaccctcttgggtgtgctgactgcctaccgcagggagacttcattaacagggggcaagggatacaagactgaagaaaacacaaaatagaacttattttcaaaccacagcagtttcaacagttacccaagcggtgtaccgaaaccacacacaggactgactttagcaaaaacaatatgaaccaaatggtttaccacagtatgtgctgttaaaaaaaaaaaaaaaaaaaaaaaaaaaaacttggtggccggctccaccctgatagaaatttctttaattctcctatttctcaagcttcttctcgaggctgcgcacgcccctagcacccgggatcggggctgtgatggggctggctctgctgcactagcgttcttggtcagcaaagtttttcaaggttctgacttttctatcttgctttgcaggaagccctccgcttaaaagcatcctcaagagctgggtgcaaagcaaaaaaaaaaaaaaaaaaacccaaaaaacaacaaacaaacaaaaaattgaatagaaatatacaattgcaaaccataaaaacggtgaatgctataaaaaccttggaaaggaaactctcttggtttaaattttttgcttaggaggagcataaaaggttcaggtgaggtatggtctcaatcaatccgattaataaaaatattagtaataaacatgagagtgagagagagagagagtgtgtgtgtgtgtgtgtgtgtttgatcctggctaggttctgtttatacagttcagttcagtgctgtacttggaaaatgcagttctgcagatgagagatacatacaaaaacaaaaagaaaacaaaaaaatacaaaacaagggtttgtggtcagggaagctgcccaccttcgctattatcctatacaacacagaacgatcacacaactctcactcatcctacacaactgtggacacacatacacaaccatcattgatcctacacaatgggacacacacacacaagcatcactgatcctacacaacagtggacgcacacatacaaccatcattgatcctacacaacaggggacacacatgcacaagcatcattgatcctacacaacaggagatggctacacaactgtcattcatcctgcacaatatggacactcacacaactcccattcatcctacacaacagaggatgcccacacaattgtcattcatcctgcagaacacagacacccacacaactgtcattcaccctacacaacaggtgatcccacacatctctcgttcatcctgcacaacatgcacacccacacaactgttattcattccacacaacaggtggtgcccacacaaccatcattcaccctacacaacacaggcacccacctgtcattcaccctacacaacaggcgatctcacaaaaccatcattcaccctacataacacagacacccacctaactgtcattcaccctacacaacaggtgatcccacaaaaccatcattcaccctacacaacacagacacctatgcaactgtcattcaccctacacaacaggtgatcccacacaaccacaactgtcattcatcctacacaacacagatgcccatacaactgccaggtttctgagagtcacgctgcctaggagagcagtggcccgggcggggcaccactccagcagagctcatccaaggccactgacatgtcttattccaccctccccatcctgccagaaaaaaagcttagctgcggggagaggggagaaagaaaacagtataggttctaaaattcatcactgctcggggacttgtcttgaaagagtgcttttccccaacacacgtcaacgtcttcctctggctcccatctaagacacatgaggggagtttgttttttacaatgtgacacacgggaccacgtaagggacctgcaggctgggagtcctgcaggcaccagccccgcgcgcactctgccttagatcaaagctgtgtcaagcagcacagccccgggagataagaatctgaggtccctgcgatcgcagcgttgagattttccactaaaaatatttaccgaattttgagaaaatctgcttcatgcattgaagggaacaggatgaggtttggttctgaactgttgagaaaagctgaacaaatatttactacgagccactgctggccgctgtgttttcctgccctgtgaggtgtgtgaggtgggcagggggctgttgaacccaatggctgtggcctcatcttgccattaaaagaagaaagtggggaaaaggtgctgtgccttggggtcctcaaaaggcaaatatcatttgaagtgagaaataacaattttctagaggtcaccacaaaaggctcccatgacatttacataaaacctgccaggcaagggctgcaccagccctggaagaaaaaaaagtgtgtgtgtgtgtgtgtgtgtgtgtgtgtgtagggtggggtatgtgatttggaaatgaatttacaaatcacaagccagtcttcatgacaaaaataatacagactggcaggtgtcacaattctggcttctttgaaaattcgcatttgttctctggcgggcacctttgacataccctgcgtgaacacccctgggtgtcagccccatcctctggggggatttccagggagagatgctatctatgcatgagccaggcacggggagccctgacagggcaagggggcccagctttgttcctccctacggagtgtgccaatgtcgcagacgccacctctgcaaagggtaggaaggcgccttgcccacatgtaacaagatccctgagaacgccgtgcagcgagtctgaaagctggttaggggtcgtgcatgaaaggacccaaaagagcccctgggaggggagcaagtgaggcgcagagcccaccaggagctcccatggtgggggacacttttgctctctttatggccagattccccattgcccgagtgcatgtgatattttgcagttagcagtggcaggcaaggggcgcgctgactcagggctttgaataggagagatgaaagatgaggggccatgttcaccccgccagaaaagcagggaggcggtgcccagagctgcacccagagcccccttctgaggcgtctgccccagccctcacctccctcaggtgccaagcaaggggttgaggtgtcctggaggcaggtacacccgatgtccccagggcgatggctcccgtctgttcacacctatactcagatgctggggtgggagcccagccactctaggcctgcaccccaccctgcagccccccaggcctcagcatttgcaccccactgaacaccagatgataatcgagtcacacgacactccctggatccgcctctgggtacagtgtgcccaggaaggcaaatgcttctattttcaaactcagtggtctttacagaacagaaagtgctccaaacggcaatctgcctgcagtcagtttaaacatacaaggctgacattcctccctctcagagtgggaccgttccttggcaccgtcagcaggtcccacccagccctaagacagaccttccagagggctcagacggaagctctgaagcttccttgaacacagcagtgctgggggatggggggcgtgggcaggaaagagggactccacctggttggccgttttaggctccttgggaccccctccccatcctggctggcaggcaagtgccagaattttccaggccccttgagatggtggaaccacttgtcccattgtagaatttcacatgtacccaccggattatctctctgagatcatcgtgggaacgaaattgaagtagttaagttcaaggctgaggtgctaaccgcagggttcaaatggagatgccatttttaaagtggatcttgtgcaatcaacaaaaggttttgggacccacatgggcacatgatggggagaggtcactgagccctggtttcgatgttggcctggcatttcagagaagtgggagagctggcagcacttaggacctcagggcttcctcggtggctgcatcctgtgtggcacccccggcagggaggtcaagaactcacggccaccctgggtggatgccacacacaggtacgggaggggcttgtttgcaaggggaagaatgacttttgtcttcttcttttgttgagagagctgctcaaatcaaacaggacagccgctggttaaacttaggtaaaagctgttcgttagtgcaactgtggggagggggcgaaaagacatgctcatcaccatcacctatgcggctttgtttaggaggtgaaaaggtcattagcagtaataaaataatcattaaattggggagaggttaaaggtgactggctggttagcggtagaactgcgctggctggtgtcaccgggcgctgcaggcaggaaccgcaacgcagggccgcgctggcaggaagtggcaagggtggggccggtcgcaggatcccactatcgcagcagggctgaggcccaatcactgacacccacacagccgtttcctgcacttaaaaaaaaaatctgtttctctctttgcaaatcaacaacttttacctagaaactcttcagcggtgagctctgactgatcttgatctccggtccgttgcagaaaatataccattgtttacctgggggaggtgtgtgccacggctaactttaacctaactctaactgacaggtttcggcagcctgccgggtctgtgctgcatctgcctgaaagaaaccagtttcttctgcccaaaacagacacctgctggttatttaataccttgatacacctttcttgaaaagacctccaggcaagaagaacttagtgcccacaccaaagctccatgcatgccccaggagatggcccttggtggtccccagagtgcactttctggcttagatggagacagaactgagtatgtggccttgagggcagatggccaactgtgggctactcagctgtacgctgtgaccggaactctccctcgaggaacctctgcaggttcccaggtggaggggtccacctgtgactgtccaggtcaacacctgtctgcccgtgcacccacactgcatgccagccacaccaaatgtcaatttcacctcaattgacctttaaacaaaataagacaagcagctcccacggaatttgaaaactgcagcctctagaacacaagagatggcaccaaagccacacgtgactcagacccaaactcacatttggtcctgtatgagcgatgacccacagaggacgctggagccctctttgaagttcaactccctgcacgctttttttaacggaaaagatttccactaaactgtgacctcacagggagaaaagggcccaattaatgactcccagaatgtgtgcagccacctcagctgcccagcctgtctttcctggaaaaggtgcccatatggcagaagcctgcgtcccggtccctgtgccgcagggtggggatgggggctacagaccacatacagcacgtcaccgtgcaaggcgcttcacccacacacccacctgctaggcctgagtgggtcccatggtcaggcaggaaaactgaggctcagggaggttaagtgacccacccggggcctccctttcctccaatgtccagaaaccagcctgatcaagcagtcccctggattctagcagaattggctgcccagaggacagaaggaagcggcctcagttctcctgtcctggcctcacacatcagccatttcctggcacagaggcctagcagggttctagaaacctctgggtgccctgggatggacaaaccctggatgggagcatgggacatcagacatgttccatgtgccaggcggagagatgacagaaaagcttgttccttcattgtgatttccatgagtgcaggtgtcaacgctgtgtgcatgtttaagactgcccactggacagcctatgggtccttcagactttttgtcagtctgtctatctccaccagctcaaggctcgaccgccaggctcacagggggtcgcatttcaccttcctcctcactcagccacgctgggacccacgcatctcgcgcaaagccccagcatctgggaagccctggggtggccaggggaaggcggccgtcactgtgtgctggccgtgtggtctccctgagcagaaaaagcctggggtagcaagaaaggcagaaaggctttttttggtttgtttgtttgttttaagaaaacataaagtccagcagtttgaaaacgttggactttatgcttaaaaaaaaaaaaaaaaattcacagattagcttcactatcttctgtcttaaagaagccaagaaaacaagagatctgccttgtgtcttcctggcgaactttctgagcacgacttcacccgacactcatctgctgaccgctcttgcccataaccagaggcctcctgggctgcacgtgggtctgtgccgtgtggccaggaaccgggaagggaattgtacagagcccggctctgattcccttgaccagagagcaagggtagggcaagcatcttcctttgcaattccccaaagagccaaacacttctccccaacatgtgactcaccaaaggtcaaccactgggtcaactcagtgtttggactgttagaggttagtacggaatcacagcacaaataatgctgcaagctcaaacggcaaccaccacacggtctgtacctaccacccagcagcgagtacaatgcagaatttttctgttcagccattgcttctgggtaaaagaatcaaatgagaaatatttaggcctccacacagatctgcagttgctccggacttaaaatgctgcgcgtgcattggctgttttagagaatgttctgaagctcatggcttggttctcgttactcctgtcttggggcaggaggcaggtcactgggtgtagacctggccctgctgccaccttgctgtgtgaccttggggagcccccatgacctccctccccgcctttcctcttccaggaaatgggcatggcctggcctgtctccctcacgggtcttgctgggacctagtgagataagaactgttcaagcacttcctaagggcccatcaatgttaatatatttctgcagagcaccgagtggcacagcaaccatcaaccacagcagaacaaagatgcagtggcctgtgccacgagtaaaggagcccaggaccccctgggtctcaaattgtgcaacagctccctaaaaagcctgaaccctgaagccaggcccaaggaagtcacccaaactcccgttatcaaacgttctacttttaacaagcattcttttctgctttcgaagcccacagtacactaacagcagaagccaaggtggggtgggtaggcttgcagagggagacacgatgggaggtgataactgagggaaagttcaaaagcagacccagcgccgggtttaggtacgtggggaggcgggggtggcggtttccatgaaacactgaaaatgaagctttgcacctgtgagctgttgagtgggatggctcctcctcagggcccagcaaatacggcactgctcggcaagtgtgtgcacccatatgagaatacgtgcacatgtgtgtaaatgtgtgtacacgtatgtaagcacagagtgtgcatgcccgggtgtgtatgagcacacacgcacgcatatgtgtgtgcacgtttgcatgcatgcattatgcaatatctgtgtaatgctcacctgtattcatgtatatgttcacatgtgaatatgtgcatgtctcaatgaatgcatgcacatatataagcatggagggtgtgcatgcccagctgttatctatgagagcatgtgtgtgtgcaggcatgcacaatgcagtatgtgagtgcatgctgctcatctctatgcatgcatgtgtgtactgacaagagaatatgcacacatgtccacagatgcatataagcatggagagtgtgcacggaggggtgcatgggagagtgcgtgtgtgcctgcatatgcgtacatgcaggcacatgcgagaatactcatgtgatgcagtatgtatgtgaatgcatgctcacctgtatgcatgtgtgttcatgtgcaaacaggtgcatgcatgcatgtgtctgcaggcgtggaggatgtgtgtacacagggtacacatgtgcatgcaagagcatacacgtgtacgtgcacatacatgcataaaaatacatggccgcacgtgggaatgtgcacatgcatgtgtgccagctgtgtgcatgcattgtgattatgcatatatgtgtgtgtgtgtgtgtgtgtgtgtgtgcttctgctcccatcttttaggcagagtgaagaggcccactgccgttccatcaggaagccaacaaggatccctgaagagccactgcctctgtgtaaggcacaggtggcctcttgcagatggaagggagtccctttgttgttttgtttttcctcctgatggtaaatgtctttgatgtgtggcttacagaaatgatctctttacgcatctgtatctgctcaacagttcacagaaaatctgctctaaatccacacagcccatacttggtcatactttttctcctgactcatccacaagaaagccaacctgggcactgcgggctgggtccccatcctcctgagagaaggccatggccagcccaggggacaggaggagagaggcggtgttctaaaaataacttcccctatgttcacctctactgacaggtggccgaggtgcaggaccgagggtcactcgtaactagtgagctgggggcatgcggagcctgctaggtccattccaggacctgcgatgacacaggggctgcaaagtgaggccagtggcagattccaggggaggggcacgtgtaggcaggagggtgagcaccacttccctcgctggagctgatggaaagggctcgggggcatgccctatctagggaagacaggtaacagaaggcatgatcctgggagtgcgtgggtctcctgtggctgcccacaattcagggacagtgtggggaacagtctgcctggaggttagagaataggaggcgtcccagaccggggcacagatggaacaggcaatgaccgggtagataaatggatcagggagctgcagtgactccttctgccacttgaagcaatagctttctgtttgagagtctggccaactggccgccggcctaactctgtcatacgagagaaatcccacgtgtgagttaaagggcttcagaatcctcaggggaccctcgagggccaaggctaggagacattggcagcactggccatggggaagaggggcagggcctgtaggaagtcccctcctcagagctgtgcgttgagatgcctgggcaagctggggcagaggggagccccgagccatcctgcctcctcacatcagatgccaccaaggacaatctcccgctccctccactctcagtcctgaagcagctgggaagggactggaccaagcagcgactcctgccaccctcacccccaacaggccctccctgagcacggacagggagaaggacggaagagaaggggccagagtggccacagggctgccggccatgagtggctcctgaagtatagccagggcgtcggggtggcactgacatgctcaggcggaggccgcacgaagcgcccccagccacaaggggagctctaaggccaaggctttgtgcactccaatacagagccagaagcccaggggcccacaggacggggcgagggcgggcaggcaggaggcacacaccacgcacatacggcacttgcgtggacctgggcagctgggccggggggaccctcttgctccccacacagggtcccacggcatctgctgctactctgggctggtgagcagggaggccctggtcccccgccatccggcaccggtaggcggtggctgcgagagaagaaagcttactgaccgctgggcggtttaggccgtggaggagcaggtttcttcggaggcagagcaggagtgtcctgtttacttttaaaggggtcatctgagaatcctgcccctcccaaggaggaggtgaaagggccagaaggtgggggctgtaagagaggacatgaaagagaggcaaaaatagttgttaaaacaaaggtgacggatgtccactgaacagacgctcatgctccaagggccctggcaaggcctcctaccctctggactgcacaacatggccctgcttggacgtggggtctctttcaagccccatgctttcctccaccctcaacagcaggggccctctggcctgtgggtgatgagctgcccaacatagggtggcagagagcagtcccatacctccacgggcttctagcaccaagggcatccccagtcacacgaggcacactgggtctttcctgactccaggacttggcacatagggtcccttgggcctcctgcttacacttcagagacacgccccaccctcacctgtatgctggctgtggtgcttggcacatgccctggtgtgccgcctccccactgagctggccggtgtggtcactgccttcagttagtgatggacagctccaggtgctgggtcagctggcaccagactttcttcctccatgcctctgggctgcacatgcagcacctcaggtggaagtgcatcctcacatgcccggccacccgcactggtcagcatgcccacgccacctccactgggctctgaccacctctggcccggaccctcggtcagcctccatcacacccatccacatcctccaccccacacctgctgtctcaaacccaaatcggaccatatcctccagcttaaagagagagacagtcagagatagttataacaattggatagatgaatggatggtgggtgggcagatggatggaatggtagttggatgaatggatagacatatatgtggattaatggacgaatgaatggcgggtgggtggatggatggatggatgggcaggtagagacagggaggcgggtgggtggtagacagggaggcagatatgtggcgacgtcttgcaggtaggtaggtaggtaggcacttcctatagggaagctccaagctctcattaaggcatgcagggacttcatcgctgccccagctgcctgatttttcaggctcacctctgaagtcacccctcccctcacaatgcctccttagtccccagaacccactgaccccccagccgctgactcagcctcctgtttccaagtcctgcaacactcaggtctcctgctggggaactcggcccacctcgtccaccaggaacccctctccttgctcagagcctggctggaccccactgccgtcccccagagctctcccagggctctccctggggctgcttcctgccacccacgcctgcactgctcactgagccacagagacacgcttccaggcctctcccacctggagggcaagcacagtcctctccccggcacctgctgcctccaggcctgtgatgagcagatactaagcgccgccacctggggggatgcttgtccctcacttggagcgccggtgaggcacaggggagccagggtctccatcagccacagaagggccagcatatctcaggcgtctgagggaaggggctggggtgtcccaggagggagaaaatcactttctatgggcagaagaaggatgagtaaccactcttactaaaacagaaaataattaagtctgtaataaaatagaaaataactacatttttactaacagaggaaacacattgttacaaaaatgcaaaataactaggaaattataggacaaagagataacactgcgacaggaaacaaaaggaatgggcagaaataggggtaaaaatgatcatgtgttcctggccgggcgcactggctcacgcctgtaatcccagcactttgggaggccgaggcgggcagatcacgaggttaggagatcaagaccagcccagctaatacggtgaaaaaccccatctctactaaaaatacaaaaaattagccggtcgtggtggcgggcgcctgtagtcccaactactcgggaggctgaggcaggagaatggcgtgaacctgggaggcggagcttgcagtgagctgagatcccgccacagcagcactcctgggcaacagagcgagactccatctcaaaaaataaaaaaaattaaaaaagatcatgtgttcctccaagagcatagaagagaaagatcagagtggggcagaggtggagggaggggccgggggtctttaactttctccccagcagggaaggcctagagacagagaacaggtcaagagtacaaaggcacactcccagggtttccctcgagaatctgaatgcaacagattgcagatgtgggggaaaaggtctaccaccacgtccagcagacagtcttagaggtatggctgcctctgcctccagcatctagtcacaccgatgcagctgactaaggctccagcgtctagtcacactgacacggccatctaggccttcagtgtctagtcacacagacaaggccatctaaggctccagcgtttagtcacaccaatgcaaccatctaaggctccagcgtctagtcacacagacgtggccgtctaaggctacagtgtccagtcacaccagtgcagaggtctaaggctccagtatctagtcacacagatgtggccatctgaggctccagcatctagtcacacaaaagtggctgtctaagactgtagactagccacaccaatgcagccatctaaggctccagcacctagtcacacagacacggccatctaagactccagtgtctagtcacatagacgcggctgtctgaggctctagcttccagtcacaccaatgcagctgtctaaagctccagcatctagtcacactgatgcagccagctaaagctccagtgtctagtcacacagatgcggctgccaaaggctctggcatctggttacacagatgcggccgtctaaggctccggcatctagtcgcacagacgcagccatctaaggctccagcatctagtcacacagacgtggccgtgtaaggctccagcatctagtcacaccaaagcggccatctaaggctccagtgtctagttacagcaatgcagccatctaaggctccagcatctagccacacagacacggccacctaaggctctggcgtctaatcacacagacgtggtcatttaaggctctagcgtctagtcacacagacacagccgtctaagattttagtgtccagtcatgcagatgcagccgtctaggcttctagcgtttactcataccaatgcagccgtctaaggctctagtgtctagtcacacagacatggccctctaaggttccagggtctactcacacacacgcagccatctaaggctctagcgtccagtcacaccgacgtggccatctaaggctccagggtctagtcacacagacgcagccatctaaggctctagtcacactgacacagtcacactgacacatccagtcacactgacacagctatttgaggctctagcttccagtcacaccgatgcggtcgtctgaggctctggcatctagtcacacagatgcgactctctaggtctctacaatttagttgcacagacatggccgtttaggcctctggagtctagtcagagacgtggccacctgtgtctctggcagctagttatagagatgcagtcatctaggcctctagcatctagttacagagatgcatcgatctgggctatttgcgtcccgtcacagagatatggctgcctcggaccttgtgtagtcctagagtcgaggttgctcggcccagtcagagccacatcagagacagaacagggaggtggcccctctaagaggcagcctacccattccaggtccccccgataagggcagtggcaggtgcccccagggaggggaaggggccccaaaggctcctgcacagatgaccccaccagatcccttccctgggcttcacgccgccctctgaagctgcccaggcaggagacactcgctctgtgctgatcttctcacctaataataggcccagtgacctggcagggggtcccactgtcagcacctctgccttacacacaaggaaactgaggcacacaaaggaggcgcagcctgcccacatcacacagcaggtccacggcggatccagggctgccacatcgtctgcctcccaggctggggccaccagacgctgccctcagctgccgagggccaccccagtggtgggtccagggcctcgtcctgggcagactgtcctgcccaggctggaaccccaaccctgccacctactcaacaccctgtgccttggtttcttcatctgtaaaatggcaagagtgacagagctcggaaggctccggcaagaaggaaatgaggtgccatgtgacaggcatcagtccactcactggcactagataaagttggcacatggaccacacgacaatgatcacaccaagtacgaagctgcgattggaatctgggagtgcccccatctgctgccccagttgtccccaggcctgtccgagacatgaggggcagtgtcggcctgcagcttagctttaaaatgggccgtttagggtcggctgtttgggaaagaatgggggaaaaacactggcccgtctgtgggtgcttctgcgattcatggaacatgtccctgggcctagggcccgtgcgagtcccccgcggcctgggatggggagccaagcaggtctagatgggaagtggtgtgaccggctgggccttgtcctccctgggcatgtgctggcttctgggccacatctccagactcggagtggggcctcggttccagtggctgcagtgagcctttctaccctctgtgtcgcgcaataggacccgggcaataaaaccacactcagcctggacgtccaaagttgtaagacctggtgacacactcaaatcagagccgcctaaccctccaggctgaccggggacacctcgggccaagccggcttggcgcctcccatgtgtgtttaaacccacgaggccaattggcaactcgcgaggcgacaggctttcaataaacgcctggcactgcctccgcagtgaatcagatcactcctagctccagaatgcccgcgtcatttccgaatcccaattttcatgacttcaagtttcccaagaagcctccttggggactcaactctttcctactcgggcagcggcttcaaggaaaatctctatttttagaaaggtttcagtaaagctgtcaggggctctctgggctcggcaagagtgaagtgtgcttaaaataaaaggaagacagaaaaagctactatgaaaaccagctctaagagaaacacgtttgagttcaccagttgaagaactggttcaaaacagaagactgaatttgtaaacagcagccctaaatatcaatgcacagctttaaacaattgagaagttgctaaaaatgggctgacgactaacccagtatttcacagatggctttttttttttttcagggcagaagagggtgaaataagttggactcttgtttttattctcaaatgctccctggaaacatactttggggaatctgtttttaaagtgagcttatgtcacataggcttgatactgtctagaaaaatctcttcaggtgagggtggggcctcaactaagagtgcaggcccgaagagcctcccaaaggaaacttctagaatcaggctgtgggctgtgactctcctcagcaaagccacgcagaggtaaggtgcttcaattcagggacttacaaaagggcctccctgctctgctcagatggggaaaagttgatgatggtttttttttgttttttaaaaaaacaccttcttgccactttcatttcccttagcattttatttatatccacaatgttgttcttgaaaaacagataggtaaccaaaaaggaaaaacagagctgcaaggtcagggttgagctcagaatgcggctgtacaagtgtcatgaaggcagctgatggaacgctggaatcaaaacaagatagtattggagacccattttccacagctctgtccaactctgtcctggcccggcaccgccaataggaagtgagaccggctctgaaatcacagctgcatgtgtgtgaagagcccctggtttcagggcccaaggacaggcagagggcggtcattagatcccggccctagctcaggctctgctagctctccctccctctgctcacagtgagaggaggaagacagatccagcctcccaaaggaagaggagtccacttgcgacaaccagaaacgaccaggacgcctgagggactgctgccaccgtgtggccaacgttttctgctttcgggagatggtttcccgcctgcccaggagcctgtgcactgggccctaaatcttctgccagtcccaaaccgtgtcacagcgtggcatatgagggatggaggccttctccgtgtgctggaaggaggggggcgccatgccagggcctctgggctccctctgcccaggctcatctgtgtaaacacacaccctgcctcggtcagaagtgggatctgctgcgccgccagggcacgcacacacgcgtctttgaaaacctgaacagaatctcaagtgcttctcggaatctgtgttctgtgatcacaagttgcgaccgctgccaaccccaagatgctcagagactcatctgctccaccagctgagtgaacacggggcagccaagggagactgcccagtcacactggcacctggggcacctgggcatggggccggtggggccccgagggggcctcatgcctggggcacgcgtcttccaggtactcccggggctccctcccctcaccaccttcaggctgacagcagcgctcacagggactgggcccagctgctccaggggaccccccacaccggccaccccttaccacctgggccatgggctccaggaggggggctgtgttctgcttgtggctactgcctcttcccgcagcgtggataatgcctgggcctctgcaggtggaactcgtgaggaaagcaggcccctgcagccccccgaagacagagcccatctgcccctgcctgggggctgccgagaagggacagagtggacgcaggtgtcagggacgggacacacctcatctgctttccttcattcctgccaaagaaaaatgctcctcactcaaacagggaaacatacaactcacaaggaagcacaatggtgccgcagccctgtccttcccactcaccacagcccccatttccaactttccagcagtttcttccggaaggcacctcagtcgtaaggggcttctattgttgttttttgacttgtccattctggatgttccctgttgaattctctatgctaccttaaagatgagctccaaccacactgccagcgtctggagaagccctacagctgtctgggaccagagccacagtgagttcaggtcaccgtgtggtgagggccggacaccaacgggtccagtctggtaaccagcctcgctgctgtcctccttcaacagttcactcctcacctgtggatctgtctgcatttattcaaggaggccggccctcacttttcaacaccccttgagagttctgtcacatgggcgactctgaacactcgctggcccactttccctggacgcctcgcacctgcaggcctgctgcccatggccctctcgagacgcctgtgcccaacgccttctcaagtttctactcggccatggcaatgacttcaccgtctgagacctgatggtcgtcagacaccagtgggagccaggggagcccagggcacctatgccactgggaagggtcagggctcaccccacgggactgcagtgcattggatcacagccatggatgctttccagacctgaccttgtgttggaaaggtgccggggagatacatacgtgacatgaacaattacgcctggcagcccacaccatgacaagaggcacaaagacactagcagaggcgcgggggctccgtggaggggctttaccttggacatctggctgaagtcggcaaagccttcagcactattgaaggacccacttccgaagggatctaaggttccaaagggatctgcaatcggcaccaacaaagtcagagttacaggtctttaagagaacatgccttctggggtggaggggaaatgctagatggcccctgaaccaggagactcaggaaggctgcatttattcattagacacgtgtgtctgcatgaaggcctctcagcaaggcccccctgcccactctggcatggcaagacggtttctcactgtgacgaccactctgggagggccagcatcattcacggtcatcagaagagtgacaagttgccacagaggcgtggcccctgggtcccactgggtctcaatgggtcaggaggcgaggagcaactccagggcgacctgccacccacatgatttatacagggtggtgtctttggatagaggtttttgctgtgttttctcctctaacctggaagggatttgcctagagtactggatacactcgcctatgataccaaacactgctacccgccccacgcaagctgcaggaccaagcggggcctgttcccaaaagaaagggggtgtccacagatgctcccattgcataaaggctcgagcgtgcatctgcgagttctacactgtgagatgaggttccttcaaacacagaacccacaacataggccagtacctggggtcaaattctggatttcttttagggaaaaaacccaaagatacaaaccaaagatttataaggaggagtgagtaaacagtagttaatatcactggtgctattactgaattcctactgccaaaattcctttctggaaagatgccagcgcgtgcccaggaaggggagcagcagcgggtgcttgttttggcctaatgggctcaggccaggatctgggtgccactgactgatgacacaaacacagaggccacgctggctttgggagtgaaagtgttaactgcgggggagctctgctactgcccaaggaatagtcaggaagaaaaataagtcatgggtctcacctgatccttttgaggagacactggaggatgaaaagggatcactggattcaaaggggtcgagctaaatgaaaggagagaggaaagagtaaaaagcagttcgttggttccatcacccattcattcaaccagaccttcctgacgtcgatgtacaacatccagtgctgagccagagggaaagtggaatgattaaaactcaacccaggcagagtaaaatcccaacagatcaaccctcctgcagatagcacctatcaacctggacggaatatccccaaaattacaaatacaaaaagcagtggcctgaaggctgggaagtgaacaagacaggaagaagactttggaggagaatttgaatgtggcagaagaacatagcaggaggttgagtttccattccgccagctacagcaggaaggcacagtgagggtgcctaagattctggtagaatctgaccaccagaggatggagcccagagacaaccactcccaggggaaaggaaggggaatcgggatggaggggcagagatgcaaagatgcaagccctgaacttcatgatccactctcccccaagtctcaggctggcctctgcacacgcaagcctggggggactcgaggcagcctgtagctgaggccacaagaactgagctgggattggagcttctgccatctgctggtgagtgtctgcagtgtgagtggcaccaagttaactgcctgctgaaacaaatccattcctgctctttggagaaaacagactacagtctctacacagaacgctcaccatgtatcagatacatttctaaacatataaagaactggaaaaatgtgaccacctctcaccggaaaagacaatcagtgtagccaatctcaaaataacccagatggtggaactctgagacagggacaacgtaaaacggtgattataactgtgctgaatgaggaaaaggaaaatacacttaaaatgagtgaaaacacaggtgaccttagaagagaaatagaaaatatacgaaagaaacaaatgaaagttccggaactgaaaaagtgtatctacaataaaaacttcatcaccggggtcagtggatcacccaagatcaggagttcaagaccagcctggacaacatggcaaaaccctgtctctactaaaaatacaaaaattggccaggcgggcaaggcacagtagctcatgcctgtaatcccagcactgtgggggccaaggcaagtggatcacctgaggtcaggagtttgagaccagcctggtcaatatggtaaaacccatttctactaaaaatacaaaaaattagatgggcgtggtggtggatgcctgtaatcccagctacttgggaggccgaggcagaagaatcacttgaacccaggaggcagaggttgcagtgagccgagattatgccattgcactgcagcctgggcaacaagagtgaaactccgtttgaaaaataaataagccaggcttggtggtgcatgcctgtaatcccagctactcaggaggctaaggcagaagaatggcttgaacccaggaggtggaggttgcagtgagctgagatcatgccactgcactccagcctgggcgaaagagcgagactctgtctcaaacaaacaaaaaaaaaccccacttcattaggttagctaaataaccaagaataaaagaaagagtaagtgaagttgaaaacagagcagtagaaattactcaatctgaagaaaaaggagaaaaaagaatgaaaaataaataaataaatagagcctcaggaacctgtgggacaataacaaagggtctcatatccatgtaactggaatcccagaaagagaggggagagaaaattgggcagaaaaaacaaattaggagaactgacagctgaaagcttaccaaatttgttttgttgttttgagatgggagtctcactctgtcacccaggctggagcgcagtggtgcaatctcagctcactgcaacctctgactcccaggttcaagcgattctcctgcctcagcctcccaagtagctgggattacaagtgtgcaccaccacgcctggctaatttttgtattagtagagacggggtttcaccatgttggccaggctggtctcgaactcctggcctcaagtgatccgcccacctcagcctcccaaagtcctgggattataggaatgagccactgaaccggcaatgaaaacttatcaaatttgttgaaaagcataatttacagattcaagaagctgagcaaagcctaaacagtataaacaccaagaaaactacacccagaaacttcaaaaactactgaaaaccaaagataaagagagaatcttgaaagtagccagagaaaaaccacctattacatacaggataacaatgacctgaagaaatactcctctccaccgggcacggtggctcacgcctgtaatcccagcactttgggaggccaaggcaggcagatcacgaggtcagaagatcgagaccatcctggctaacatggtcaaaccccgtctctactaaaaatacaagaaattagctgggcatagtggcgggcgcctgtagtcccaactactcgagaggctgaggcaggagaatggcgtgaacccgggaggcggagcttgcagtgagctgagatcacgccactgcactccagcctgggcaacagagcaaactctgtctcaaaaaaacaaacaaacaaacaaacaaaaactcttctcattaaggacaatggaggctggaaggcagtggaaaaacacactaaacaaacaaacaaaaccccaacaacctacatcaaacacaatgtccttcaagaatgacaacaggcctggcacagtggctcatgcctgtaattctatcactttgggaggacgaggcgggcagatcacttgagttcagttcaggaggtcaagaccagcctggccaacatggtgaaactccatctgcattaaaaatacaaaaattaaccagaaatcgcttgaacttgggaggcggaggttggaaaaaaaaaaagaaaagaaaagaataatagctgggtgaagtgactcaagcctgtgatcccagcactttggaggggctgaggcaggaggattgcttgagcctaggagtttgagaccagcctggccaacatatggaaatcccatctctacaaaaaataaaacaatagctgggtgtggaggtacatgcctgtggtcccagcaacttgggaggatgaggtgggagaactgcttgagcccaggaggttgaggttgcagtaagccaagatcacaccactgcacttcagcctgggcaacagagtgagactctgtttcaaaactaaaaataaaaaaatgacaacacagtcgacctgagctataagaagtgctaaagaaagttctttaggctgaaggaaaatgataatggagggaaaaccaatcttcagtaacaaatgaagagtatcagaaatggtacatatttgggtaaaactaaatgactacttttttcctctttctttacaatacccacaatggattaatacaaaaattgtaacagtcttatggagtttctaatgtatttagatgtatgaaattcacatgacggctataacataagacatgctggctgcaagggtgggtggacaaatggacctacatggttgcaagttttctatattttacatgagataatacaatactaacctcaagtagactatgaaaagttaaagctgtacatgatatttcctaaagcaacctctaaacaatcattaaaagaggtatgattaaaataataaaaggccaatagacagaattcaaaaaaacattcaaacaattcaaaagaaagcaggaaacaaaacatgggataaaaagcaagcaaataataaaatagtagacttaaaccatatcaataattacattaaatgttaatggactaaacattacacttacaaggcagggacttctgactggattttaaaaaaaaaagcaagccccaacactatgctacttacaaaagacacctatcagttttaaagatccaggtaagttgaaagtaaatggttgaaaaatgatgtatcatgtagtgaataacatgaggagaatgaagtgattaaacagacttcaagacaaagaacatcaccagagatcaaatgggaatcttttataatgataaaaaggttgttgtgtcagaaagacacaacaatcataaacacctatgcacctgacaaagcttcaaaatacacaaagcaaaacttgatcaaattaaagtgcagtatgaacaattccacaatcataggagaatgtttaacgcctctctctcagacactggtaggactaaaaaacaaacaaacaagacacagataatctgaacactatgaggaacctcaacctcactgccatttgtagagcattacacccaacaactagatacacattcttctcaagtgtacatggtttgttcaccaacataggccacaaacaacaacccttgattaatgtgaaggtattgaaaacatacagaatatgttctcaaataacaaatttaattaaaaatcaataataatagtattataatatacctaggagaaaaagccaagtatctggaaatgaaacaacatacttttaagtaatccataagtgaacagaattcacaagggaaactggaaaatatctcaaaactgaatggcaatgaagagataaagtattcaaatatatgaaatacatgtaaagcagtgcttaagggaaatatgttgctttaaatttatacagatgctccttgacttaccatggggttacatcctgataaacccattgtaagttgaaaatattttaagttgaaaatgtacgtaatatcccaataaacccatcacaaagcaaaaaatcagaagtcaaaccaatgttaagtccagacactccttgacttatgatgggactgcatctcgataaaactattgtaaagtcaaaaaactgtaaattgaaccatcgtaagtcagggaccgccagtactagaaaatgaagtctaaaattaatgaatgaagcttggatcttaagatgttagaagagcaaagtaaccccaaataaataggagtaaggaaatggaaaaaaatagaaatagaaaagagaaaatcaatgaaatagaaaacaagcagtagagaaaaatgaagccaaaagctggttatgggaaaggtcaatgaaattggtaaacagatcaccaataccaggaatgctagggaaattctcactacaggtcttaaggacattaaaaaggggccaataagaaaatactgcaaatgagtctttgccttcaaggagcttcaagcgctaaagaccaaaaggtccacagggagtgagcgaggtgggcgccagggtagcaggagccctgagaaggagggtgagtgcccgtctctgagcaggccccgggcctgggttgcagcctagaaaacggaagaaggctatgaagcacgctcactccatcatgaacatcctctgctccatcaccgaggctgcttttttttttttttttggttttgaaatccaagttgacacctatttaacccaatctcttgggcataatatgcaaaatacccggtgtctgccacgcccggggatgggagtacaggtatgctggagttggaaactggagggtcagagttggctgatgctctcaggagacaccaggcaaggcagccgggctgagacgcctgcacttactcctgccgtgacgggagcacctaccaaacgtgactctaaggtccccaccagtgctgtgtgttacaaggaccgtgcagggtggccgggtccatgcgagcatgtggtgcttgtgtgatttagtcttttttgggagatgaaggggcagtgggggcagatgactagagttgaggggtaggaatggggatagagaaataagaactatgggtgacatcctccttgccctgatgtggggccactggactgctaactgcaccttggggctcacaggatgtcactgcagtgactaggccagtgagctccctcactcagcaggaatgaaatcagcctgggataccagctcccggagaacagacaccatggcccacactcgcaggcaccatgtacgctccacgaagggaagggggccttcgggaagcgccacccttaccacacagagcaggcacgcagctctcccgggcaacgtcccaccccactcaccttcgaaggtaaggaagggtttttcgtgaatggatccgaggtaaatgggtcattctttgtctgtttcttgaagaagtcgtcagtggcagagccacggaatgggtcactttctttgaaagggtcccctccaaatggatctagaaggaaaaatgccccataagtaaacattataccaagtgaaagaacccagacataaaagaacacatcacagaatgatgccgtttacatgaaattctagaaaggtaagaacgctagtgacggaaaacaggataatggtggccaggggaccctgaggagagggtggagggtgacaacaaaggggcctcaggaatgacagaagtgttctcaaattgcacacaaccgtgcatatttaatgaaactcatcttattacatagtaaaatgggtgaattttgttctgtgtaaattatgccactcaataaaattgactttaaaaataataatatcctggccaggcacaatggctcatgcctgtaatcccatcactttaggaggctgagataggaggatcacttgaggccaggagttcaagaccagcatgggcaacacagagaaaaataaaataaaaaattagccaggtgtggtggcacacgcctgtagtatcagctactaaggaggctgaggcagaaaggctgcttgagcccaggaggtcaaggctgcagtgagctataattgcgccactgcactccagcctaggcaatagagtaaaaccccatctctaaataaataaataaaatatcctgcaggagctggatataataataataataataataataataataataataataataataataaacaacgcaggtaaatccatagagacagaaaataggttggtgggtgccaggggttgcgggagggaatggggagtgactgctgattgggatggggtctccttttggggggatgagaatgttgtggaactagatgaaggtgatcattgcacaacactgtgagtgtgctcaataccactgaattggatgctttaaaacagtgacttttatgttacataaatttcacctgaaaaaaaataaatcggtcgggcatggtggctcacgcctgtcatcccagcactttgggagaccaaggtgggcagatcacctgaggtcaagagtgtgagacgagcctggctaacacggtgaaaccccgtctctactaaaaatacaaaaaattagccgggcgtggtagcgggcgcctgtagtcccagctacttgggaggctgaggcaggagaatggcgtgaacccgggaggcggagcttgcagtgagccgagatcgcgccactgcactccagcctgggcgacagagcgagactccgtctcaaaaaaaaaaaaaataaaaaataaataaataaataaataaataaaataaataaataaattagcaagcaatgtgatcccaccacactccagggtggggtgcgggcagtgactggacctggggaggggagccacctccagaagggaacgggaccgagaatgggtacaacatggatggacggccgtccttcccagttacatggctgccatccccggtgtatgtggacacaagtcccaccacatgcgacttctgagccaggactggacacagtctaaagaccggtccgggaaacactgaattttacctgttgaagttgtctgctgttctgcaaaggggtcattctggaacgggtcgcctggttggaagaggagagaaatgcttattagctctagggcacaggatgcgggccgggcccttggacacagccacccacctcccaagcctttcattgccttctactcctccagtgtagggagagaatgttagttccttctctactatccacctgccctcaaaaccttggcaaatcaaagagggggacctggaggaggcagctgtttctggctaggatgtttaagatgagaaggaaggtactgctggctgtcccacacagactggagttggggaagacacagagtgggctagaattcactcctctcttcccatgctgggtttcctttatcccatctgcctgccagctccctgggtaagaggacacaggaccctgggctgtccctcactttatcaccggccctgcagcaatgaggcggcggcacccctgggcttcaggggctgccagattcgcctctcagacccggcaggcttcaaacccaagctgaagctcaagctcccgctgccctctccccacctcagtgtttttctcaaaaatgtagagagccttcctcctggaaatactgttttgctctgaaacatggacagaaacttggaaatcttgtttctggaattcttagttattcttgactcaggtgtggctctggacagactcctaaaattatccagaccttaggtttatgtaggaatccatggttttccaggtactttcatgatcattactagctctgattattttatcaaccctgtgaggtgagcaaggaggaaatttattaacctgctgagggattaggaaactgaagtactgaagggttcaagggggctggccaagctgccttcaaatgtgggtcttgtggtgagcttggaacacttcccactgtatcttgatgccttggctctctggttaacagggtgagataagaagcttaaaaggcgttcctgctgggtgcggtgcctcacacctgtaatcccagcactttgtggggctgaggcgggtggattacctgaggtcaagagttcgagaccagactgggcaacacagtgaaaccccaactctactaaatatacaaaaattagccgggtgcggtgatgggcgctgaggcaggagaattgcttgaacccaggaggcggaggttgcagtgagccgagattgcgccactgcattccagcctggctgacagcaagagagcgagagttcgtctccaaaaaaaaaaaaaaaaaaggcattcctttccccctccatttcagattgtggcatgtccttacttttctagttgaagaaccactctaaattcgacataaaacacacagtctttcaatgagaaagtgggtagcaagtgagatacctttgaaggggtcagctcctttaaatgggtcagatttgaaggggtcttctgtctggaaaggatccggatgcaactcttgcgtgttgttgctaaataacaaggctttatttttgaaaggatcatcctacaattttgtgaagaaacaggacagggattttattatttctgagttaaagcaaagtacggaattccatacttaactcacatttccactttgagtagcatgaccctaaaaagaatgatttagccaggagttcgaggctggcctgggcaacatagcaaaatcccatctctataaaaacaaaaatttaaaaatgaggccaggcatggtggctcacgcctgtaatcccagcactttgggaggccaaagcaggtggatcacctgaggtcaggagttcaagaccagcctggccaacatggtgaaaacctgtctctactaaaaatacaaaaaattagctgggtgttgtgccgggcacctgtaatcccagctacttgggaggctgaggcaggagaactgcttgaacccaggaggtggaggttgcagtgagctgagattacgccattgcgctccagcctgggcgatagagtgagtctatctcaaaaaaaaaaaaaaaaaaatcaaggtgtggtggcgtgtacctataatcccagctacttgggaggttgactcaggagattgcctgaacccaggaggtggaggttacagtgagctatgattgtgccactgcactccagccacaacagtgcaagaccctgtatctttaaaaaaaaaaattaattaaagatcattgaagaagtatgaacttgagtgaataataatgtttaatactggttcattagttgtgacaaatgtactatatatgatgtgactaacaggaggaactgggtgtgggatatagaggaactatgcactatctttgcagtttttctttttctgaaacagggtctcactctgttgtccaggttggagtgcagttgcacactcatgggttactccagccttgaccatctgggctcaagtgatcctcccacgtcggtctcccgagtagccaggactataggcgcgcaccaccaagcctggctaatttttatattttttgtagaaatgaagtctctcactatgttgccagggctggttttgaactcctgagctcaactgatcctcccacctcagcctcccaacgtactgggattataggcatgagctaccgcacctggcctatctttgcaattttttcataaatctaaaaactattctaaaataaaagttcattaaaaaatcattgagtggaagcaactcaaatgtccatcgatgaatgaatggataaacggaaaaacaaaatttttttctaagtcagaaaaaaataatgaatttgaaatgtcatcaagaaaattgtaacgagccacacaacagaatctgattcagccttcaaaaggaagcaaattctgacacatgctccaacatggaagaaccttgaggagaggctgctgagtgaaatcacagtcacaaaacaacacacaaggtatgattccacttctatgagaaccctagagtcatcacattcacagtgacgaagtagaacagtggctgccaggggctgtgggtggggggatggggagtgggtatttcatggggatgaaaacgttctagagctgggttccacaacaatgtgaatatacctaacactactgaactgtacacttaaagacagtgaagatggtcaagtttatgtctatttttctttctttctttttttttttctgagacagagtttcactcttgtcatccaggctggagtgcagtggcgtgatctcggctcactgcaacctccacctcccgggttcaagtgattctcctgcctcagcctcctgagtagctgggattacaggcgtgcaccaccatgcccagctaatttttgtatttttagtagagatggggtttcaccatgttgggcaggccagtcttgatctcctgacctcaagtaatccacccccctcggcctcccaaagtgctgggattacaggcgtgagccaccgcgcccggctgtttgtctattttacctgaaagttaaacaatttttttttaatcaatgagtcagaaaaaaataataaacttggaaatgccatgaagaaaactgtaaagagccactcaacaacagcagcacaggcctcatttcagaggtgtgaccttcctcaatcatccttttctcggtgagtatgtacctaggtgggcatttgggaaaatggagttttcataccaagaaacatgctggttgtttctgtcctatgaggaaatgagtacttatgcagttagaattactagagcatacacaatgctttgcattttttttttaaagtgtgtatttctagaaacaaacaggttcatttaaacgagaagaaaaaatatttacttttgaagagcacatttttgtaatgggaagtagtctgaaaagggtgggtttgtcatatacatgggaacaatacagttggtttaaataaggactctgttttagttaataaagacacaccctcagtgaaaacatgaatgtttcactgtgatattaaaaaaacagcacaacaccctcattgaatttggcagacacactggcattcctgcgtaggactcacaaaccagtccagtattccaaccgaccaaaacaaaatcattaaaaagccggggcgtccacaaaaatagggacaatggtgtggggaaatgacatcaaaggtccaaaagaaagtttcctagcaaggctgccaccaccctggggcagccaacttaggggtgcaggacagttatgagaggtacagagttaagacaagccaccggtctgggctgtgaatgagtgtgaatcagcatgagtgccgcttcctcggcccccacttcaggagaatgcacccacatccctgccatctgatgaacatggaatggtttttcttacctgggaaagaatagctggagcctccgaccacagggttttcccaaggtggggaaaccaagccgggttcttagacaagttaagtacagatgtccacaagcactgcagctggagacagtgctgagtggacgtcaggtgctgacgaccacaagacacacacgcccagcaagcgtctgatgggggtctcggatgcagataaagatggagaagtcctactctaaagaagccaggaggcccacgtggaaaatctgcctttcacactgccccatggaaggaggaatgtatttgttccagaagaaagagaggaatcatgacctggataaagcagcgagttaagaatgccagcttgacctcagaatgaaagcttctatttagtttgtttttaaaggtaggatctcactacgttgcccaggctggagggcaatggctattcacaggtgcaatcccactactgagcagcgtgggagttttgacctgctccgcttctgaccagggcaggtttacctctccttaggcgactggtggtcccctgctcccagaaggtaccatactgatgactaacttagtgtagacacccaatcagcatagcacactacagcccagaactcccgggctcaaggatcctcctgcttcagcctcccaagtagctgggactacaggcactcgccaccatgcctggctctatttagtttttaattggcatttatttataaggtttttttttttcagtgttttcagtcgtcacttggaagactgccaagtaacagtgaacaatggcagagaagagactgaggttctgggaatgctggctgcaagccccctgcactgacagtcaggcctgcaatcactttctcaggagtcattggcctgaagccacaatcactccttccccttccaaggggaagcctgagaccccagcaggattcaggaggtcagggtaactaatagtggttttgattccattgcacagaatcagagtgggaaacgagatttccctgttacaaagataccatcaactctaccccttgcagaccacctactaaggagaacagacccatctgccaacttgggggacacgagtacagcagacaagggccaggatgaatgacacggcccttggcagagatgtaatatcttgaacaagttcagcaaccagtgtgaagttgtacccttcttaggaaatacacacggcaactctgaaagggggctgaagaagcttctgtgacattcccgccctttagaggagtgctgggcagcaggggtgtgctgggaatcagttctctcagaaaaaagccctggtttagagcttctgccaattcctgtggtgtaaacagtctcatcatggttgatttcaagtttccaagcaactagctcacaagttcctgttttttgctttttggggttttttttttttttttagagattgagtctcgctgtgtcacccaggctggagtgcagtggcacgcagctggcctcaagcaatcctcccacctcagcctcccaaaggactgggattacaggtgtgagccattgtgcccggccagttcctatttaataatcggttctggaaagtcaataaaaactggctccagcatgccactgggtctggatgtgacagatcaatcaacctttcttaatctgtcctcagtaaggcctaagtctgggatgatttattagcttctctccataagttgattggatggtgagcaagaggtcaatattctcataatcagatgatagacaagaaataaatatggctttaagaaccctgactttggcgggtgaggtggctcacgcctgtaatcccagcatttggggaggtcgaggcgggcagattgcctgaggtcaggagttcaagaccagcctgggcaacactgtgaaacctcgtctctactaaaaatacaaaaattagctgggcatggtggcacgtgcctgtaatctctgctactcgggaggctgaggcaggagaatcacttggacccgggaggcagaggttgcagtgagctgagattgtgccactgcactccagtctgggagacagagcgagactccgtctcaaaaaaaaaaaaacaaaaacaaaaaaaaaaaaaaacccctgacttttgagataaagtcacactgcgtgagcttcacatggaatttagtaacctgagtagaactgtccaaacataggaagttccagatgtaccactgtggatacactattctcagggacctaaaacccccaacttcgacccacaagggagaactaagacacctctctctcggctctgaagcagtcttgaagtgttcaggagtaaacaaaaatctctcttccaagtatttattaagaaatagaaacaagccagaaaaatgctttaaaaactgtatttgtacaacaggataaaaacagtttttctttcggatgccagttgcaagtttccatgtaacgtatcttaatctacattcccaaagtaattgtgtctcaggtaacctttgccctgcccaaaagatgaacaaaaataaccagaaaggtaaaaatctgtctttggagttgggggaatcactggccacttgcaaactgccacttcactgccaacttttatccaagaaaaccggtttctaaaaacctgcaaaagggacatttaagaggaagctgttccctgaacgaagactgagcaggacaagccaaaagcggtgccaggggacaatgccagatggggaaagtaggagccgggttgtgagacggaaacacacacgccaagaacagccagggagcaaagcgaggagttctggcttctcgtaactcatgaaggatgaatgctcatcgtttaaatttagacgataaagctgatgatgacgggcccgggggcggctatggaaaccacctcattacgagtccacgagaaaagagagtatgggaggaaagagggaggcggtgcacccagcgggggccagacacaagagacagatgagctcgccagcagtgccttcccagcagcccaggggacgcgtgtgcttccccataaatccttgggactgaggacttggctgctgagaaaagaaacacatcaagcattgaacataaagaggcaagtgtggtgtttagagagcacgagcgctcactcttattccagggaggaagaggaatccatgacgtacagaggcccaggagcagaagggctccagggaggagccctgggagagagggtggcagcacggagagagctgctggaggcagcagagcaccaaggaaacatccagacatgcgcggcccggcccatccgctcccggaacagcaccaagacgaaatgggaaactacatgtccccaggttcgaggctgcaggggcagactctggtgtgaacaggggggatgtgaccacctaaggaaaaggtcacacctgtcttggtatcaggggctcaagagctctcaaaaatgtaaggggccgacagtcccctgccccaggcctgatcacaactccagggtcatgaggtcagagtaaagtgcagaggtttttaaacataaccaaaatttcaggagaggccaattcttacttgaaagagcaacaccctggggcgctgcttgccattacttcctcatctttagcaacacatttgcttttcaaggtgttccttgtggaaacacacatacacatagacacatgcccctcagatgtcccctgccccctgattagtagaatgtggggtttccacaatgagcagaaactgatccaattttggttaagtttgagaagccctctgaacttgggtggttggcccaatgtaaatacttccgcagagatggagggcattcaaaacaggttctgaaaggatccaggcctatcttggactttgttctggaagccaggattcagcatggccacctgtgccaggctgcaaggcctggtgtgaacgcgcaaagtggcagcaaaaacaacagacagccgcctgcacttggctggaaccaacgttggccatgaacagatctggcgggtgggatgttctgctgtcacaccaggggaccagagccccatactgtaatacgtttattcaacctttaccatggctccaaaactgcccctctctgccagggagacgccttcgctcaggttggccaggtcggtcaggctggcaccatgggctccatcgagcacctggtcatactgctccaggctcctgtgggcctcctggcggctttcatgcagctgggaaagtttgctccttgcctgtgcaacaaagacatcatcagcattaagcagggtcaggaaaacatgtcagaaaagacgctttttttttttaaaacacagggtctcactctgtcacccagactggaatgtagtggagtgatcatagctcactgtagccttgagctcctgacctcaggagctcctcctgcctcagcctcctgagtagctgggactacaggtgcgtgtcaccacctatatttttgggcaacaaaccaagacccatctctgcaaaaaatacaaaaaaaattctgtattttttgtagagatggggtctcgctatgttgtccagtctggtcttgaactcctggcctcaagtgatcctcttgcctcagcctcctaaagtgctgggatgacaggtgtaaggcactgcactgcgcaaagcaacatatctttgctcctgacacccaactacaaactctaagggttagaagagaaaacactgaaagtaatcctacagatattaaccataaagcacaagaaagggtggtaaatctctgagcggtccatgcttgcgatcaactgtggcctataaactggctaatggagcacagacagagaccagttcaattggtaaaagaagtgtgcctggccactccgacacaggcgagggccagtgtcacaaccactgtgtagactggatgcccagggccaggacagaggccttcatctactgcccacaggagagcagggaagggcaacggctgcaggccacgagaagccagcgcccccccctggactgggaagagggtgggggcgtcccaggcagcttagagaatgggggtcctgcatggcgtgatgctccagggtggcgcctcctgaacacaccagtggctgtggaggatgacgtctgttctcttgcccaaggacaaagaagtcatctctctgactttgtccctcttgtttgtgtgaggaccaggctggaaagaaccccaagttctctccaaatgagccattaattaagtgttcccaccccaccccgcctactccttgaagatgctgtgtgctcaggaaaggaaagtgaactcctccaggccaatgccaacaaactctggaacatgccctggggagtccttggccctgcgcctccaggccagcaccacagcctcccaaaagagaccctcacgtaagtaacaagggtgagagcaaaggagttcagcagtggcagcctcggctcttggggctcgctggtccctggcatgtggcagggacccgactccgtgaagtacctggttgatttcgtcttgcgttgacttcagggacttgatgatggtttccagctggactcgcccagcctgaatgctctgctccagctgggtttcctcctgctgcaatcggttcagctccgacttggctcggttcagatcgtcttcctgggactttaagtcagattcctgagattggatttgcgttttcagtgatgagatctgaaatgagatgttaaaagatgttaaagagattcacagtgcaggatgaaatgggactccgagaaagaactcttagcccccatccccgaaacaagctaagccagggacgcagacacctaacccaggcccgacacctggcttccttacaggcctctttctacacccaaaatagagacacaaatgaaaaggcagatgggctcatcccactgtggctaacggaagatcactttggaataatgaggggcatgaccaagcacgaacaatctgtccatccccccagaggctgaacgtcatagagttttctgaggttgcagcctccgggatctgtgaggagcctcagagacacctgaggaggggacacaggcaccctggaactccctgtgttgtggggcacagccaggtggggtgtgttcagggcacaagttcgcagggaccaaggccattcacttatacaacctgacttctaggagtacaggggggtggccaggaagtcaagccacaggtgcttggacacttttccacgtggtgtttggaggaactctattgacccagtaggatgtctaagtgttgtgttcccaggtaacacgagctcaggggagtccttgggaagcccctgcctgtgcatagggcgctgccccggaggtggccgggacccaccatctgagtctcatcctggcacttctgccggacgtcgctcagcatgtctcggagcttggccttctgctggtccatctcgtccaggcggtcttgagcatcctgtttctgagcctcgagctcctgcaaactgcttgtttcccggtctaggtcattttgtaattcctagggaggagttgcaggggtttacgtgaggatgggaaaaatgaagcatgtccaagataacggggggcagcctgggccagaagtccaggggaagcctccgaaaccacccactgtgaccgtgctcagggccagcattccgtgcacacccacggccaatgtgtgcctcttgggctggaggcccagggccactgtctcaccagctccctcagcaggtatttcccgatggcctaacagaggccaggtgcgagagaaggggctgggtccctgtgagaaaaaggccccagctcccggatgacatgcagctgtggctgcggaggggaacatcacccaaacgcaaataaacgtggacaagtggcaccaagggggtcacagggaaactacagtcacaccttgtgggcagggaagatgcccacaaaagcagcatttaggatggggccaacaggtgagcaggtgccaggcaggtgaagagccagggacagagcctggcggagggaaccacagggaccccagggtcggggggtgtcgcactccagctagagcaaaagggaatgggtggaggcatcagaggctgcaccccacaggccacgccaaggagactgcgctgggctctgtggtggggagcccggtgggatgtgtgagtgtgggaggcgggacatcatgattctgtttctgaagctctctctgaccccgtgggatggatccagatggtcagcccgaggctccaatgccccatgattccacttccaagaaaagcatcctggaagcatacagcgtgtgcagaggtatacaacgtctatgacagcaaaatccgtaaacaatgcagatgtccatgaggtgctggctggaaggttccagcacagcccacactgtgggacgctccttggccatggaacgggatggcgccgtgtgctttgccttacagtgggacatgagcacactgcatttgtgcgaacgggaaggggagggtatgtgtggtatgcatcaacctttctggaaggccccctccaggagctcatgaacagcacctccggggatggggacacccaagaagagggcagaggcttctcacctcctgattttcaaccacgcaaatgcattatctgtctttaagataaataaccaaagctgaaatagcacaacgggcattgtgacaagcctcctccctccagctgccatgtggagcgtggtgcaaggggccatcaggacgcaggaactgcaggggcctcgggtggggtccagggagaggcagcagcagctggggcctgagtgaggtggtggtcgtgagaatggagaggaggggtgggtttgcggggagccatggctgggtggtggggctgagtccgagagccagcctgggctgctggggtggctggtgccctgagataacaaaaccagaggtggcccagggtctcccctctcctcactatggggacaaaaacatcctggtgcttccctgcctcgataggcaaatcatgcctcaggaagctggggtctccgttccccagtctccctgcccctggcctttcacttgagggctggatctggaggggacaatcagggtcacttatggacatgttcgacaggaaactcaggagaaagactccagtgagtgtgccaggaagggaagatgctggaaacataaagtcaggcgtgtcagcatcaaggtggtatttaaacacgtgggaatgggtgaggtgtccagtggggggcacagagagagcctgaggtagcccaatgctccgagcgatgctcccaccagggacggaagcctctagagcctcctaagtctaaccctggccccatcaccgggtaacgctggcagcaactccctggtgtcctgggcctcagggttctagttagcgccacactggctccttccaggccacggcccatggatccaggacactaggggctccaacacctttggcctgcccagagaagttccctcctttacctcctcctcaaaccaaagatgccaaaatgtgtacatcacatccttcatgcacagagcagagaatatttgcccagaagaggcatgacaggaggacaagagggaactcactggccacatgccgtgtactgaatgtctgttgttgaaattctcacccccaagatgatggtattaggtgtggggcctctaggaggtgattaggtacagcccttgtgagtgggattagtggccttataaaagaggcccctgagagctgcctcgatctttccactgagggaggacacagcaagaaggtgctgcctatgaaccaggaagtgggtcctcaccagacgctgaatctgcaggccccttgatcttggacttcccagcctcctgaactgtgagcagtaaacttctgttgtttataagcctcccagtgcatggtgtgctgttatggcaagccaaatggactaagacacacatgccatgtcagcgtctgcagtgacaaaggtgctcagggtacctcaccacttctctaagagggttctcacagtctcaacccctcctcagaagctcctgccctactcactcttggctctcccttccctttcttctccccactccccagcatttttttttcttttgagacagaatctcactctaacacccaggctggagtgcagcggtgcagtctcagctcactgcaacctctgcctcctgggttcaagggattctcgtgcctcagtctcccgagtagctgggactacaggtgcacgccaccacgcccagttgcgtgatttttttgtttctgtgtttttgtatttttagtatagactgggtttcaccatgttggccaggctggtcttgaactcctggcctcaagtgatccgccagactcagtctcccaaagtgctgggattataggtgtgagccaccatgcctggccttcttttccccttcttgattcttgctttctcccttcttgatatataaaatcaataaagctgaaatacacaattgtttaaaccttgctgggtaattttttgcacatagtttctcccccatttaggaacctgagctgcagtttccttcagggcagtctccgtcttcccccttcattgaaaaatgtcattgctccgtcaggccacagcgcagccaacccctgtgacgtgacaactcctggattcccctagacactagtggagaccctgggccagaaggggtggctgctgatgggacagagactgtgtctccaaacccctgaactgaggcattaagtctaagaagtttgggggtgataacacagaataactgaaacagagttagttgtgggagctggggatgtgggtggccacatctaaggggagtgatggataagggaagggaagatgggaagagcgttaggccggatggggtagctctggacaccaggtaacaacagtgtggaactgaaggaacctggacctcattccgtaatggagaaggagccatcagaaagtcccagagggacaaagacccaccagctcgaggttaggaaggggagctcagagcaaaaagaagacaaaaataaccccaacagtccacggagtccacacaatccctgtcagaatcccagctggcttctttgcagaaacagacaagctgattccaaaattcatatggggccaggcacggtagctcacgcctgtaatgccagcacttttggaggccaaggcaagcagatcatctgaggtcaggagtttgagaccagcctggctaacatggtgaaacccagtaaaatacaaatttgtaaaaatacaaatttttacaaaattttgtaaaaatacaaaaattagctgggtgtgggggcacgcatctgcattctcagctactcgggaggctgaggcaggacaatcacttgaacccaggaggtagtggttgcagtgagccgagattgcgccactgcactccagcctgagtgacagtgagactccgtctcaaaaaaaaaaaaaaatcacatggaaacacatgggacccagaatagccatgacaaccctgacagagaagaaaaagatggaggatgcccatttcctgatttcaaaacttttacagggctgcagtaatcaagtcagtgatgtagtggcatgaggagaggcagataggtcaatgggatagagctgagggtccaaaaataaatgcacagctatagtcaactcatccttgacaaggatgctagggccattcaacgggggaaagaagaggctcttcaacaaatggcactggcccagcatggtggctcacacctgtaatcccaacactttgagaggccagagtgggaagatccctagaggccaggtgtttgagatgagcctgagcaatacagcgagaccctgtctcttaacaaaaaaaaattgtttttgaattagctaggtgtggcagtgcacaccctgtagtcctagctactcaggaagctgatgcaggaggatcccttgagcccaggattttgaggctgcagtgaactagaatcataccactgcactccagcctcggcaacagagcgagactgtctctaaaaacaaattttttaaagtaaaataataaaaacaatggtgccatgacaactagatgtccacatgcaaaacaatgacattgcatccctgccttatgctatatacaaaaattaactagaaatggatcaaagacctacatggaaaagcgaaaactataaaactcttagaagaaaacacagggatacatcatgtgacctgagatttggtaatgggttctcagctatgacaccaaaagcaacagcagcaaaaaaaggataaaccagacttcaccaacattaacaacttgtgcttcaaaagacaccatcaagaatgtggaaagacaatccagagtggactctcagtggatgctgagaaggtatttgcaagtcacatatctgacaaggacttctacctagaaatgataaagaattcttcaaattcagctataggccaggcgcagtggctcccgcctgtaatcccagcactttgggaggccaaggtgggaggatcacctgaggtcaggagtttgagaccagcctggccaacatggtgaaaccctgtctctactaaaaacacaaaaattagctgtgtgtggtggtgcacacctataatcccagctacttgggaggctaaggcaggagaatcacttgaacctgggaggcggaggttgcagtgagctgagatcgcaccactgcactccagcctgggccacagagtgagactctgtctcaaaaaaaaaaaaaaaaaaaaaaaaaatcagctataaaaagaacccaattaaccaggtgtagtggcacatgcctgtaatcccagctactcgggaagccgaggcacgaaaatcatttgaacccaggaggcggaggctgcagtgagctgagattgcacccttgtgctccagcctaggcaacagagtgagactccgtctcaaaaaaaaaaaaaaatgcaatttaaaaatcggcaagaaaaaaattttttcaatataaaagggcaaggaatcggaatgatttttctccaatgactacatacaaatggctaataagcacatggaaagatacttgacgtcgctagggaagcatgagggacatgccaatgaaatccacaatgaggcagtgctccacacccaccacgacggctagaaggaaaaacgggaaatgggtaagtgttggtgaggctgtgcagagctggcaccctagtacactgcttatgggaatgtaaaatggtacagccactttgaaaaacagtctggcagctcctcaacagttaccatgtggcccagcaaattcactcccaggtatacacttgagataaaggcaaacaggtgttcacacaaaaacttgcagacaaatgttcctagcaacaatatttgcaaagccaaaacatctatcaatgagggatggatgagtaaaatgtggcccatcgtggcttggcatggtggctcatgcctgtaatcccagcactctgggaggccgaggcaggcagattgctttgagtccaggagtttgagaccaacctggacaacacagtgagaccttgtcgctgcaaaaaaaaattaaaaattagccaagcatggtggtgcatgcctgtagtcccagctactcgagaagctgaggtgggaggatcacctgagtctgggaggcagaagttgcagtgaaccaaggttgtgtcactgtactccagcctgggcaatggagtgagacactgcctcttaaaacaaaaaatgtgctccatccacacaatggaatattattctgccataaaaaggaattcaacgctaatatatgctacaatatggatgaccctcaaaaacatgatgctgagtggaagaagccaggcacaaaaggtcatgtgttgtatgattccactgacaggaaatgtccggaactccaggtacctgagataaatgcaaacaggtgttcgcacgaaaacctgcagacaaatgttcctagcaacattattcacaacagccaaaaagtgggaaaacccaaatattccccgatgggaggaacagatgaaggaaatgtgccccattgtggctgggtacaaatccatacacacagaaaaaagatgagtagttgccaggggctggagaaaggggagaatgggaagtaactgcttaatggggatgaggtttccttttgggttaatggaaagttagtgtcaaactcttccactcactgaaagagaacagttaacgatgaatctttcagaaagtaaccttccatttactgttcagggctagatgtttttatgggcctactggcgcctacgggagaaacaatcaggttctaactcgatagagtgatggttaatcaacacggtgattatgcgaaacaccactgaaatgtacactttaatacagcacatttgacattaattacatagccatccttcagattggtattaaaatttgcagatgctcaagtgtgacataaaacggttcagtgtttgcatataacctacacatgtcccctaccctagcaccaccccatattacttattcatttatttttgaggcagggtctcactctgttgcccagggtggagtgcagtagtgcaatcacagctcactactgccttaaactcctgggctcaagtgattctcccacctcagcctcctgagtaactgggactacagacacatgccactacacccggcttttgcaaatatttttgtagaaacagggtcccactgtgttgcccaggctggtctcaaactcctgggctcaagcgatcctccggcctcggcctcccaaagtgctgggattacaggtgtgagccactacagccagcctcgtatactttaaatcatctctaggttatttataatacctaatataatgtaaatgctatgtaaatagttatcatattgtattgtttcatcaatttggattattttttatttttttatttttttaatctgtggttggttagatccaaagatgcagaacccttggatacagagggccaacttgtctcaattttagaaaaagagaagccaccgtctatggttataagcaactttaaaaactttagcctgtaattccagcactttgggaggctgaggcaggcagatcacgaggtcaggagattaagaccatcctagccaacatggtgaaaccccatctctactaaaatacaaaaaattagccaggcatggtggtgcgtgcctgtaatcccaactacttgggaggctgagacaggggaatcgcttgaacccaggaggcggaaattgcagtgagctgagatcgtgccactgcactccagcctggcaacagagcaagactccatttttaaaaaaaaagaaaaaaaaatcttcactctcgccaggcttggtggcttacacctataatcctaacactttgagaagccaagacaggagaatcatttgagctcaagagtctgagaccccatctctatttggaaaaatatatatatatatatttttaaaaacttcttcttctccgagaaaacaccgaatggcggatgacaccggtgcagcggggggtggggggggggggggtgtcagaggccctgggatgggcaaccacagtaacttccacggaggtttcagcagtggcatctggggctggggtcgcggccgtggacagcaccggagccgggaccaaggccacggagcttgcagaggcaaggccgaggataaggagtggatgcccatcaccaagctgggccgcctggtcaaggacatgaagatcaagtccctggaggagagctatctcttctcccgcccatcaaggaatctgagatcattgacttttgcctggggggctctctcaaggatgaggttttgaagattatgccagtgcagaaacagacccgcgccggccagtgcaccaggttcaaggcgtttgttgctatcggggactacaatggccacatcggtctgggtattaagtgctccaaggaggcggccactgccatccgcagggccatcatactggccaagctctccattgtccccgtgtgcagaggctactgggggaacaagatcagcaaaccccacattgtcccttgcaaggtgacaggccactgcaactctgtgctggtgtaactcatccccacgcccaggggcactggcattgtctcagcacctgtgtccaagaagctgctcatgatggctagtatcaatgactgctacacctcagccaggggctgcactgccatcctgggcaacttcgacaaggccacctttgatgccatctctaagacctacagctacctgactcccaacctctggaaggagactgtattcaccaagtctccctatcaggagttcactgaccaccttgtcaagacctacaccagagtctccatgcagagcacccaggctccagctgtggctacaacatagggtttttatacaagaaaaataaagtgaattcagcctgaaaaaaaaaaaaacaaaaacttcattctgcagcccccaagagctcatgtttccatccagggcagacccctgcccttccccaccaccagccagggagggaagttttcctgaactacatttagcacaaagtagatgtaaccaaaacgaacgagacccttacctgcacctcgctggttttctgtctgattgcctcttccttttctcgaatgtcttgttccagtgaatatttctctctgaatgtttaaaaatatttcatgaaaacaagagtgaataataagcctccaccccttcccaaggcctgattctgttcacccccacaaaagcccctctgtgtgctggcagaagtctaagaatgagacccagcgactgctcgccctgtacagtcccttccccgtcaactgtaggtaggacctgtgaccatgggagggatcgctcccaatgtaaccaccctctaaaagcagcgcgctttctccacctggttgcccaagtggaagttagagatgtcccaagtgtgataaggacccagagcgcccttgctgactttgaaggtggaggggccacgtgagggggaacaggggcagtgtccaggagcatggagtggccctggctgacctcagaaaggaaaaagagacctcggacccccagccgcagggaaatggattctgccaacacctgaatgagcctagaaacagattcttcccctagagcctccaacaagagcccagcccagccgacgccttgacctcagcctgtgacaccctggacagcccaggacagcctgtctgaactactacttttttttttttgagacagagtctcgctctgtcacccaggctggagtgcagtggcgcaatctcagctcactgcatcctccgcctccccagttcaagcgattctcctgcctcagcctccctagtagctgggactacaggcacgtgccaccacgcccagctaatttttgtattttcagtagagacggggtttcgctgtgttggccaggatagtcttgatctcctgacctagtgatccgcccgcctcagcctcccaaagtactggaattataggcgtgagccaacacgcctggcctttttttggttttgtttttttttttttttgagacaggctcttgctctgtcacccaggctggactgcagtggcacgatcatagctcactgcatccttgacttcctgggctcaagcaatcctcccaccttagcctcctgagtagctaggaccacaggtgtgccccaccaggcctggctaattttttattttttgtagccgaggtctcaatatatggcccaggctggtctggacctcctgggctcaaccgatcctcttgccttggcctcccaaagcacttggattacagtcatgagccacagcacccagccttcttttatttttaaactgagatagaattcgtgcatgtatttcctagcactgctgtaacaaatcaccaactgggtggcttggaacaggaaaaattgattataggtgtgagccacaaggcccagggtttagtgcccttataagaaggaccccagagagcttcctttgctccttttgccctgtgaggacacggcaagaaggtgactctccaggaatcagcaaatgggtcctcagcagacccgatctgccggtatctggaggttggactttgcagcctccagaactgtgcgaaatgtctgatgtttcagtcacccattcagagtggtttgttatagcagtatgaatggactaagaccctcctcttgtgcccaaagaggctgcctcagggacaggaacaccatgtgtctaacagaccctgcctcctgcccagggacccaggacttgtgcaacaataaggccctctcagggacatgtcgccagacacacagtaagtgatcattggaatattcatttccacaagcccagaaacttacaatacaaagtgctctttaaactgaaggacctgacatgcccttgctggcttatggcagtgtgaaatcataagaggaaagctcagcccacactccccgaatcaagggccactctcagagccacctgctcaaggggccactgcaggccccagcctcctacagatgggcactctgcacacaccagcctgtcacctccacattggggaaacaaggcttctggctgtctgaggccacactggggtgattcacgccccagcgtcccttcctagaccctgacccttgcacgacaggggctccctccatccttggcctgcccggtcctgattctcaggcctgcccaggctctaggatgctggccctgcatcctcaagacaccctcagccttgtcaggctgcacatccttgctgatcgccagtttggataacacggcccccaggagctgagacagaacaggaaccatctgctgcactgaacatgaagtgggatgcctgactcaggccgtggctcaggttttctaaccagccacccaccttgatcccctccaagacctaacctgcctttgctcatcagggctctgctaacagcacaaaaccaaggccagaggagctgatagaatactgcacctgttaatatgacccccggggatcccccagctaggaccaggatccatcctccctgggaaagtcaaagccctttccattttcagccaagtaaacaatctctttcccacagagggcaaagcacctttgggcccttctgcatggtgccccgtcatcacaagagtccaccctgtcctagaatcgactggaaaaaagatgctggctggcacagtggctcacgcctgtaatcccagcactttgggaggccaaggccagaggatcacttgagctcaggagttcgagaccagcctgggcaacatggcgaaaccccatctctacaaaaaatataaaaaaattagccaggcatggtggcatgcacctgtactctcagcttcctgggagggtgagtgggaagatcacttgagcccaggaggcagaggctgcagtgagctgagatcacaccactgcactccagcctaggtgacagaatgagactctgtctcaaattaaaaaaaaaaaaaaaaaatctagccagcatggtggtgcgtcctagctactcgggaggctgaggtgggaggattgcttaagcctaggaaacagatgctacagtgagccatgatcacaccactacgctccagcttgggtgacagagcgagaccctgtctgaaaaacaaacaacaaaaaaggatgtcattcttgaagaggatccagaggggaatacaggaagtgactgcatttctttataccagactctaaaagtacagacagcccatccaaagccctcgtttacacatgaggaaactaaggcactaggcaagaaggggagccacagacctggaggccccttcacaccttcagctgctgggtcctaagcccgctcctcgccatctgagacccaattgccctagctgtcaaggataacaaggccttcctagcactggggaggggctgatgcctggggctactgagctgcgacctgcctgagaccacaaagctgccacaggctctgcccatgacctgcctgggacaacacagctgccacaggctgtgcccatgacctgcctgggaccacacagctgccacgggctctgcccacgacctgcctgggaccacacagctgccacaggctctgcccacgacctgcctgggaccacacagctgccacccacaggctctggtcaagacctgcctgagaccacacagatgctacgggctctggctgaggctgattcaaatggaagatgtcattcttcaagccccttgagccagtttaggacctcagaagctgtatcttttccttccttctgaataaacctgtgatgagcaaacttccaggtgagcctctgatatttccgataacaacctgggagagttcgtgtaacatctggatgtggagggaagggccgtttccaacatacctttgtaactgggcaatctcttgactgatgtcatcaagctccttcacgccagtaaactccccggagccgagagagcctgaactgtcctagaattgaattcagaggcgagatctctaattagcaacctgacatcacctgacaggaggcaccagcagttctcgggcccagggataaaattgtccctttagtacacagggtgaggtagcaaaagtgtcagccccctgcctggggaaatacctgggcagccaagccaccctcccgggggcccctgttgaggaaggcagggaccacaggcagcacccgccaccgtgggctcatgtgtgccaccagtgccacctggtggcaggcggtgggaagggatgtcaatacccccagggcatgaccagcaccactcaccgggccgggcgtgcctctctccgaaggcgggaccatgtccggcgagaggacttgaggagggtcgatgcctttactgaccttctgctgaatgaaatacatagctaacgcgaattggtctttgcttaacttccccgtttgcctcgtatcggccagggccctgggagaaacgtggggatgctaattacacatcacaggcgccgactcagcctgaacccaagtcaccgatcccttgcttttcaaaaacgacagcgacgaaaacaacggcagggcgtggtggcaagccccagctccttccctacttcacatctccttcccaggaagtggcccaggggttccccgctcccagtgtcccccaccctaggagggctgtcagggctgaagaaccccaagcccctgacctgggctgaggagccgaccccctgggaaaacctcactagggctgagatgcagctgcctcttcctttggcttatctcgtgcgtggggcaggctctgatgctgcaggcatggagtagaccagcccttccgtggaaatgggtgctgagaccaagcattgtccctgtagctctgggtcatctgaatggccccggctactggccttcaatggggatgacagcagcactttggggtgtcatcatgatgaagaaagaatcagcaacgactctctttccttgttatgaacggaacgtttatgtccccccagattcctatgtccaaatcctatccctcaatgggatggtgttgggaggtggggcctctgggaggtgatgaggtcatgagggtggagcctcaggagtgggattagtgcccttataaaagaggccccagaaggctctctctgctccttttgccatgtgaggacacggcaagcaggtggccgtctacaaactaggcagtgagccctcaccagacactggatctgctggtgcctggatcacagacttccaccccccagagccgtgagaaatgtctgtttctaagccactctgtctatggcactttgtcacagcagcccaatggtctaaaacactcctcttgtgcccaaatgaggctgccacaggggcatggccacaatgcacaggacagtcccccacaactaagcgtcccctgcccacatagctcttggatgtcctgaaagatgggccaaggcagcatctgaatagcagcacacagtggtcctgtggagctgaggtgagaggctccgcgacactcacaatcaaggagccagccagggccgggtgcaatggctcatgcctgtgttctcaacactttgggagctgaggcgggcagatcacctgaggtcaggagttcgagaccagcttggccaacatggggaaatcccgcctctactaaaaatacaaaaattagccgggcatggtggcgcgcgcctgtaatcccagctgctcaggaggctgaggcacgagaatcacttgaacccaggaggcagaggtttcagtgagccaagattgcgccaatgcgctccagcctgggcaacagtgagtctctgtctcaaaaaaaaaaaataaaaaaatgaggagccaaccaggaagggaagggacccttgtggagtaaggacaaggcctttggcatctatgaaaaatgtcttccttcacccatgctgccctctcaacgagggacctcgtttcccacctcccgtgtagctgcggcagaagccattacaacagaagtttccccttttaccaaaagagagctgggaccgttctaacagacttatttatacccaaatgcagtccgtgaacagagctgcggagaatgagcagatctcaaagaacattgctgataaatgcctagttatccccacagttcgaggccctgacgatttcatactgccactgtctctccccagtctgcccctgcgggccccagcctgctcgtgggctgcagctgcctctccactcccgccccttctctgctcctgccatctctcaaggagtgtgggctccaaggcccacctgtggaaggttctgagagaaagaaggagaagcaagcttaggggtggctcagtcagcggccatccggctctgacaccacatcctgctctgctgacccgtacggtggcagccatcgcagggaaaaagcctctgtcttcatgctccccctcctcccagtccctcctggtgtgtcatctacattgggccatgccccgccccagccactcgcagacacatctagacttcttttctcatggttattcaagagcctgatcatcctttccttcccctttgctgcccgcatggaatgacctctgagttccttcttttgatccaggtggattagtgatttcctgtgtcatttccatgtcattacatcatgtgtcaattgcagcatgcattataaattactttccctctactgacccctagacatgacagtcagggtgtcagggcgctaaccaggaactgtatgtgtgttggtttcagagtcataaaggggacactgtgttttgttggtttctaaaagggacactggatctgaggcagctgagacccactgtccctagccagttggaggcggcttggccatttgggtgatgactctgcgacagctagttctcaggctcccacctcacagtgtggtcatctgtgaattaccactaaggacagtcatttcccccaagccactaagtaacatcctgaatttcactgctctacttggaggtatttgcctctcgagaattatccagcaattctttccttttgatagctcccaagtgaagccttctctaaggccacaaggctctgagcaacaagctcaaaagtgacttcagccctggccagtggcaagaggagtgccccagccctatgaagtcggctgtgtccagccctgggggaaagaggggttgaggccgactcctcgactgggctctgaggcactgacagggtctccttgtgctcaccctcccgccaggagccaaagcactggcctttccagagcagggcctcctgcccccgccctcaccctgccaggccactctgctagaggctccaaggccctgctgcccgcacctcccggaggcggctgtgacaaagtccaggcctcctgttagagccagcatcacagccagcaagaatagggcccagctgtgtaagcaaatggcctgggagcacttaagacggaccagaggcccttcctactgaaagacagtgaactgaccgtcacggagcgcgggcttcgagccttggcacgtgcaccttgctcagcctctgtcaggccagggagaataaaggacgccagacacagcggaagcctgtgacaggctggagggggccccctgaccaccaccctccacagtcttcacccacaggccccctggagccacccacagccacaactgccacctgtccggccttaccatatgtgtgctagaaggttctgggtgaggcccgagtgcatgaagatctccttcacctcctggccactcacgtagccatccaggtccaggtcggtcttcaggaatatctcatcaaatcgcatcttgtctgccacgggcaccacccagttcactgttggctgaaacagtttttggcaaaacagttaatctggaagctttttatgacccccagacacatgctttttgatgatggggcgattaaagcacttccatgcacatttggcatcaaactctcctcacttccatgagccaagagggcagatgtgatccttgttctgtaactggcaaaactgaggctgagacaggttgaggctggctctgtgaagctcacccagatgccagtctgcacctctctccaccccatcacccgctctccttgtccatccaccctgccacccagggtgtgagggaggctgtgatcttcaggggatgggttcaagcatgccaggaaagaccctcccgagcacccacttggaaggaccgtccctggagaaccggcccggccacatgccagcctccctggtcctcccactcctcagcccgcaaaggctgccctacaggcagccaaagtgtcctgtcccaggactctgaagaccacccttctatgtccctgccccactcctgagacaacaaagatacccccaaggtgtgagtacacacacgtcactgacaggtaacaaatgagacaccaccatccaagagggccaccacccacgaggccccaccaacattcatgcagccccaaccccaccagggcagatggagccacgagcccagtgcagctcaaagttcacagccctggggctgggtcacccgctgcacgtgcgacccctctcgccaccagctcacagttaacttgagagaggcaaacgccatcatgggtcaaccagggcccggtcacctcctggttcagaggcattgaggcccctcaggcactcaggggcaggccccttccgtggcctactccacctgcattaccgcgggccttcaatacacccaccacgccacagttcacggcatctgtgtcctgaactctagacgtgcttttcctcttccctttttttttaaatatttacacaaatcactccttttaaacaatctcataatagcaatgagaataaacacctgattgaattatctagatgatgagggagtggagagaaaaaggacaggcaaatgtggctggagggatcgattgttccttctccacgcagcaactgtacagaaaagccactccactcctcaccttcaatgaacgccatgatgcctgaaactgccactcaaagtcattcctctcagttatgaaaggatttcttaggctgggtgcagtggctcacacctataatcccagcactttgggaggctgaggtgggtggatcacctgaggccaggagtttgagaccagattggccaacatggtgaaaccccctctctactaaaaacacgaaaaattagccaggtgtggtggtaggcacctgtgatcccagctactcaggaggctgaggcaggagaattgcttgaacctgggaggcagaagttgcagggagctgagattgtgccactgcactccagcctgggcgacagagcaagactccgtctcggggaaaaaaaaaggggggggggatttctcaaagagttctcacagtgttgacaacccgaagatgtccataggattgaggagaagggactcatggtcaagactgggaaacaatggttaaactcgtttactcttcatgaacgagtctcctgtgatgtccaaatctaacaggctcctgataccaactcagggaaatcagaaagcaagcttgggaaacaagggataccatgtgacccagatcagcttagttcaggggtttcacgtagcaagtatgtgtgatgaagtacagcaaggacttgatcaaacaatttatcaaaatccatggagctaggccaggcacagtgctcatgcctgtaatctcagcactttgggaggccaaggcaggaggatccctcaagcccaggagttcaagaccagccagcataacacagcaagaccccatctctacaaaataaataaataaataaaattagctaggtgtggtggcatccacctattccagctactagggaggctgaggtggaaggatcacttgagcccaggaggttgagatagcaatgagccgtgattgcaccactgcactccagccagggcagcagagcaagatcctgtctcttatatatttaaaaaaaaaaaatctatggatctaattcaaatgatgagagttcagatggcaagagcaacctgatttttacttgtggcattgtactgtgtaaattttgtgagccttctcaagtctggtggacgtaaagatgccaataaaggaattctaatgagaaatgggcttgctgccttttaagtcacggagctacagcaagctaacctcagaagccagggatcacaaagaggtaacaggagtcagacaagctgagctgtggcgggacacagaaacaaggggggttctgtgtcccacgggtcccaagaagaaattacgtatgaaattatagctctgggatgacaagagtcctaataatacttgctgggcaaacaaaaggaactcactgcctgatttctggagcctcagagtatgttagcagcaagattctgatgccaaattgactataaacccaacacggggcagccttgccgtggagctggctctcccagtgacagctgggctttaaggccggctcagcagccacaggtcccaaaggaaggatatcagaccctggtggctggaagtggcttcactcaaacctggcatgagggcaaaatcgggtggcccttgggaggcccagacaagagcattgctggcctggagatgaggaagttggagtagggggagcatgtggactgtaggcccccagaaatgctcgttttcatgactgtgatcctaccaatgccgtcgtgggggcaggagctataccctcccaccccaccccaccaggggccactggtaaaatcggtctagtcagagggtcttgagagaaccaccagaagatcactagagaggtgggttatgacgctgggtgacctgtgcctaccagtgagtttggccccactagcttcgttgccagtaaagtacctcccctaacctgactttcaaaactcttggcaagagctctgcagacacaggctgggcacggtggctcacacctgtaatcccagcactttgggaggccgaggcaggaggatcacttgagccaaggagttcaagaccagcctgagtaacataggggagaccatgttgaaataatgagataaatgaatactttttttttttgagatagagtttcgctcttgttgcccaggctggagtgcagtggcgcgctctcagctcactgcaacctccgtctcccaggttcaagcaattctcctgcctcagcctcccgagtggctgggattacaggtgcgcaccaccacacccagctaatttttttgtatttttagtagagacggggtttcaccatgttggccaggatggtcttgatctcctaaccttgagatctgcccacctcggcctcccaaagtgctgggattacaggcgtgagccaccgcacctggccacaagcattttttaaagacatttcatcacaagcttgaccgttctggggttgcatgttaagaactcccgagaaacatcctactgtgctctgagagggggctgtgcccgctgagggctccgtacctgtgtttgcttgaggctgtgcttgggggacaggctccctgtgctgttgaggctgctgacgctgccgtgggacggcgtggagcggaggctgtcttttggtggggggctggcaggcaggacggggacggcgccagggaacacagtcttctttctcttggagggtgggatgagggacgggggcagggcggagggcacgggctccttctccagggctcggtacaccaagtgcatggcctgcaggtgcaaacaacaatggcactgaaggggcaaggctggggccgggaccatcaggagaaggcagagggcagccctttgggggctgcagtgacaggacactctgtcaggacgctcccaagctgaccagagtgaaaagaaatcattcctcatgagttatcttttatgtgtaactttccaagacatgtgttgaattattcctcgagactgaaatgcacacagaaagaatccaatcaagccagactccatatgcatcccttcaccactcagggaggccaccagctccagggctggcaccttcccagtactggatttggaagtctaaagacaccagaagagagacctgtacttcaagacgttcaggagtagtcccagctacttgggaggctgaggtgggaggattgcctgagcccaggagatggaggctgcagtgagctgtgatcgcgccactgcactccagcctgggtgacagagcgagactctgtctctataaaacaaaacaaaacaaaacaaaaaacagtggaactgaggatgcatccatgaggcaggccacagccatagaaataaattccttgtggaaggccaactaataaaagtgcaaggaatgatggttttgattagcacatcaccatttggcagccaccatcatcataattaatcttgccagattaaggcgagactcatcagcgatggtggaactctcatggaagagtctgagagtcatgggtgttgaccgtatcaaggcgtgccccacatgagatgaactgagcacagagggaaaaagagcaactgcccacaggaacccacaaccttgacccaccttgacccagtgatgaatgtcaacatggcagtaagaagacatgttgacatcacgttcccccaggtgggaggcccatgtggggcgggtgtgacctccgtgggattcctgtctcacaagagtgcatgacctgggtcatcaagaggacctggcagccaggcccaggcctaggaacactccataactgctggcctgtgctcttcaaaatgtccacgttgaaaccaggcatggtggctcatgcctgtaatctcagcactttggaggccgagacgggcagatcacctgaggtcaggagttcaagaccagcctggccaacagggagaaaccgcatctctactaaaaattcaaaaaaaaaattagctggctgtggtggtgggcacctataatcccagttacttggaagactgaggcaggagaatcgcttgaatccaggaggtggaggatgcagtgagctgagatcatgccactgcacaccagcctagatgacagagtgagactccctctcaaaaacagaacaacgacaacaaaaaaacaaaaagtccacgtcaagagacacgaagagcgatggaggaactgttctagatcccaggaaacgaaagacaaaagacaacaggatgtaacacacaggactgggttctctttagacacaaggaacatttttgggacaactgataaaatctgagtaatatcctgggattagataataatagacacgctcatacagaatataaggggtatatacaggatataatgaaaacatcataaatgcaatgctatgatgtgaatttcctgattttgaagtggataatggttatgtgtgagagaagtccttgtttttaggaaatacgcactgaagtgtttgtggatgaagaggcatcatgtctgcaacttaaccctaaaatggttcacaggaaaacttcgtgcagcagtgggaagggcgagagagtgatggagggagggaggaagaagggaggagaaagataaaacaaatgtaggaaattagtgacactgggaaatttgactgaagagttttcaaaagaattttctgtcggaggccaaggggggaggtcgcttgagttgagttcgaggctgcagcaagggtgttcacgtcactgcactggagctggggtgacagaacaagactctgtctcaaaaacaaaaaataattctctgtattacaggttgcgtatcccttatccaaaatgcctgggaccacagggtttcagttctggagttttctgaatttctgaatgtgtgtattacacttactggttcagcattactaatccaaaaatccaaaatctgaaattcttcaatgagcatttcctttgagtgtcatgttgatgctcaaaaaatgtcagatcttgaagcattctggtttcagactttcagattaaggatactcaacctatactgaaactttcctacatacaaagaactatgtcaagacaaacacttaaaaaatgaaagaaggaaggctgggtgtggtgtctcatgcctgtaatcccagcactttaggaggcagaggcgggcagatcacttgaggccaggaactcaagaccagcctggccaatatggtaaaaccccatctctatcaaaaatacaaaaaaattatctggctgtgatggagtgcacctgtaattccagctacttgggagactgaggcatgggaattgcttgaacccaggaggtggaggctgcagtgaaccaagattgcaccactgcactccagcctgggtgacagagcaagactccgtgtcaaaaaaaaagaaagaaagaaagaaagaaggctaggtgcagtggctcacgcctgtaatcccagcactttgggaggccaaggcgggtggatcactaggcaggagatcgagaccatcctgaccaacatggtgaaaccctgtctctactaaaaatacaaaaatgaggtgggcatagtggcaggtgcctgtaatcccagctacttgggaggctgaggcaagagaactgcttgaacctgggaggcggaggctgcagtgaaccaagattacaccactgcactccagcctgtgtgacagagcaagactccgtatcaaaaaaaaaaagaaagaaagaaagaaagaaggccaggcacagtggctcacgcctgtaatcccagcactttgggaggccgaggcgggtggatcacaaggcaggagatggagaccatcctggccaagatcgggccactgaatgccagcctggcgatagagtgagactccatctaaaaacaaaaaaaaaaagaaagaaagaaagaaaagggagggagggaaggaaggaaggaaggaaggaaggaaggagggagggagggagacagagagaggagagagggagagagggagggagggagggagggagagagagagagaaagaaagtgaaagaaagaaaggaagaaagacagaaaagaaaggaaaagaaaggaaaaggaaaggaaaagaaaagaaaagaaaagaaaaaagaaaagaaaaaagagagaaagacaaacgaatccagcaacccctgcgcactgcacatttccttcctgggctgggtggggaggaaacagcaggacttaccacagcgaactcatctcgatccaagtgcccatccttgtcaatgtcactgaggtcccagacctgcaagggagagaccagcatgggtaactgtgggaggaaggactgggtgagagtgagaccacctgccggaactcagactctcagccgtggcactcactgggctcaggagacggcagtcaatatacatttcaggaccagtccgcgagttctcagaaaaaccatcacctgtgaagtactgtcaactaccagatctgtggtctgacaatcatcatgattataatcatattgattataagattataagtttaaaggctatactttaaacttaccctgagtttcttctttattgtcttacagagacatcttagaaaagacagctttgattgagtacaggtgttgccctaaacacccacactccctatgctcactcctgcaaaccccacccctcccttgcattctcagctgggcagggctgcgagctcatgtctgagcaggtctgtgggtctcgtctccactccccagcagtggatggtgagacaggtgtcaggccactcagtgcgctgaagagaaggcaggcaggcgtgggttctggagcgtgcctaagacacgtgcagatctcaagcaccatcacgctgccagcttcctgacccatgccagccttcctggatgggcacactgcctgccaggccaacgctgggcaggctgccagtccccggatctaagcagatgcccgtggctctatccatgatgcttcatgtgtcagcatcacctctctccagccaatcaccagggcttcagtccatgcaggtttctcacatctggtcctcctctccacctctgctgctgcgcccgaggctcaggcctcaccagcccacacagccaagagcctccagctggcctccctatcccagtcttgtccctatggctaccacaggaactgctccagaacacacacctgaccctgccccaccctgctcctcagcctggcagatggggccctgtcacctggctgctgctgagcccctgacggtagcaggtccctgcaccccaacccagcctccacagactccacggggacctccacctactttaccagggatccaggactccaacaggcctttctggctccacagtcctccctcagcccagggcttccccacctcagcactactgcctgttagggctggatcatgctctggggtgtgggccatgccgtgcactgcagggtggtgagcagcattcctggccttgacccaccagatgccagcagcactcgacccaggtgtgacaaccaaaaatgtccccagacattgcccaatgtcccctggggggtggaagtgtccagggggagctgtggccctaactggcatgccagactgcctgaggcctctgtgccttcactcaagttgcccacatgcccagacttctaccagagtccccctcaccctggaggatgtgaccaggggcacctcttctagaaagtcttccccagctgccctgctccccgtgctcgagtgggtcaggggccctcccctccaccactgccctcactgggccaaactgtgattatcagggatgctgtgggggtgtctaatggacagggcaggtgaagagggcaggctctagggacagctgctccagaatgcacactggaccctgccccgccctgtccacagtaggacctcatcccttctccacccttccacaactgtgcaaccaaggtgacttcccaaccaccctgaagatctgcttcgccatctgaaaaatgggtggtggaggggtgtgagacacagtccttaacaggagggctgcaagtgctggatgtgtgtcttcacgcagagcactagggcccggcctgcccatactaagccctcagtaaataagtctcagcctcttagctattacttatttgacttctttgacggtatctaattatccccaccttcccactgcccagcacaaggcatggtccactgcaggctctgaaaaatgcttactgaatgactgaccagatgcacgatgtgtgagtgcctggatgcacagatggatgacagcacggatgcaagtgcgcacggatgaatgtataaatatggacacacggggacatggcagcatagacatatgggcacaaagacgcatgcacagatgtggataaatacattgcatgggcatgtgcacacacagatgaatggatcatagggatgcggagggacatgggtgcatagatgcatggatacaaagatgtatgcatggccgggcacagtggctcacgactgtcatccatcccagcactttgggagtccaaggcaggcggatcacctgaggccaggagttcgagaccagcctggccaacatggtgaaaccctatctctactaaaaatataaaaattagctgggcgtgatggggtgcacccgtgttcccagctacttgggaggctgagacaggagaattgctcgaaccagggaggcggaggttgcagtgagccaagatggtgccagtgcactccagcctcggtgacagcgagacttcatctcaaaaaaaaaaaacttttttttaataaataaataaataatacttatatttatggttagatagaaggtatacattctttttttttttgagacagagtctcactctgtcacccaggctggagtgcagtggtatgatcttggctcactgcaacctctgcctcccagattcaagcgattctcctgcctcagcttcccgagtcgctgggactacatgagtgtgccaccatgcccagctaatttttgtatttttagtagagatggggcttcaccatgttggccaggatggtcttgatcttttgatctcgtgatctgcccgcctcggcctcccaaagtgctgggattacatgcgtgagccaccgtaccgggccagaaggaataagttctaaagttcaacagcacaacaggggaactatagctaacaataatttatcatatctttcagagtcttccagaagagaagatttgaatgttcccaacacaaagaaaggatcagtgtttgaggtgatggatatgctaattaccctgctgggatgattacacattgtgtgcatgtatcaaaccaccacgtggaccccacactacaactattatgtatcatcaaaaataaaaataatgaaacgcaaaataaagcaaaacacggttgactcttgaacaacatggtttgttgaactgtgcaagctcacttatgcttgtatttttctaaccaaacgtggatacaaaatacagtagtcgtgggacgtgaaacccgaatatacagagggccgacttttgtatgtgcaggactgattgcaggacttgagtatgcgtacatttcggtgtatgataggggccctggaaccaatccccctaagtataccaagggacaactgtacttttagttaacagaaacaaattgaggcttttaaaattaattaatttggccaggcacggtggctcacgcttgtaatccttgcactttgggaggccgaggcaggtggatcacctgaggtcaggagttcaagactagcctgaccaacatggtgaaaccccatctctattaaaaatacaaaaattggctgggcatggtggctcacacctgcaatcccagcactttgggaggccaaggcaggcggataatgaggtcaggagatcgagaccatcctggctgacatggtgaaaccccatctctactaaaaatatgaaaaattagccaggcgtggtggcgggcgcctgtagtcccagctacttgggaggctgaggcaggagaacggcgtgaacccaggaggcggagcttgcagtgagcagagattgcgccactgtactccagcctgggcaacagagcgagactctgtctcaaataaataaataaataaataaatacaaatacaaatacaaatacaaatacaaaaattagccggctgttgtggtgcatgcctgtaatcccagctactcgggaggctgaggcaggagaattgcttgaacctgggaggaaaggttgcagtgagctgagatcatgccactgcactccagcctgggtgacagagcgagactctgtctcacaaacaaaacaaaacaaaacaaaaaattaattattattattatttttttaaacagagtctcaatccggttgccctggctggagtgccatggcacgatctcagcttattgcagcctcgacttcccaggctcaggtgtgattctcccacctcaacctctagagtagctgggactacagtcacgcaccaccacacctggctagttttttgtatttttttttcagtagggatggggtttcaccatattgcccaagctggactcaaactcctggactcaagtaatctgcccgccccagcctcccaaagtgctgggattacaggcatgagccgccacaccagcctaaattgagggttttttttgtttttgtttttgttttgagacagagtctcgctctgttgccctggctggagtgcagtggtgcaatctcagctcactgcaatctccacctcctgggttcaaacgattctcctgtctcagcctcccaagtgtctgggattacaggcgaacaccaccacacctggctaatttttgtatttttttttagtagagacagggtttcaccatgttggccaggctgttctcgaactcctgacctcaagttatccacccacctcggcctcccaaagtgctgggattacgggcgtgagccaccgcaccaggctaagactttctttaaagagaatgcataaaatttttcctaaatttgcagcagagttgaaaatacttttaccttgagctttatcagaagaaaaagagtaattaatagtagaaaagagccaggagtggtggtgctcttgcagtcccagttactccagaggctgaggtgggaggatggcttcagcctggcagttcgagaccagcctgggcaacacagtgagaccccatctctaaaaactcaaaaaaagaaataaaaaagcccgggtgtggtggctcacgcctgtaatcccagcactttgggaggccgaggcgggtgaatctgagataggagtttgggaccagcctggccaacatggtaaaacaccatctctactataaatacaaaaattagctgggcgtggtggcatgcacctgtaatcccagctacttgggaggttgaggcatgagaattgcttgaaccggggaggcagaggttgcagtgagccgagatcgtgccactgcactccagcctaggcaacagagcaagactccatctcataaataaataaataaataaataaataaataaatagacacagacacacattcccacattcagcacaatggaaagggggaaagcccaagttggggagcttaagactgagctctactggtcccaaagccccaggcagcaatttcacttctgagtccacctcctcatctgtgaagtggaaggattctggcaccttccccagggactgggtgaacactgtaagccacaccctaggaagccctgagccagctggggctggacccacaggagcgctgatgaaagcccctgatggcacagggagaaaacagagcaagagccttgtaagcaccatggggaaagagaacagtggcgcccacacacagcagggacactgagtgcagaagaaccaagcccgtggcccacttaccctgcccaggacatcaagaggcagctttgagttcatgaggactggcttgactttgtctccagagagcaaaccattgatgggcaagaggctttcaaaaatcccatcaaatttggccttttcttccacctagttggaaagaaatagcccgagtaagtaggagagcacacctgtgtgaatgtccagaccgagctctgaccgaaagccaagtgaaaatggccacggacccatcatcacccttggctaaaagcacaaaatgatcttagaacagtcttggccccttggtttccaaagtgaacatataccctgaaggaaataacgttatggcaacctcggatctgggagccaaggtcctcaggagggaggccctggccccgggtcttgtccttcgtcctagctgctgcctgagtgtggcaggagtctcccatggtggggcagtgtctttgcagggagacaaagatcagtctcacctgcctccaaggagcccacttgtaccagaaagacaaaagtgtgagcagatgttagtgcttgagcaaataattatcaaaatcaacttaaagtacaggaagtcctctttttttttttttttttctttttttgagacaaaaatcttgctctgttgcccaggctggagtgtagtggcacaatctcagctcactgcaacttccgactcccaggttcaagcaattctcgtgcctcagcactcgtacctcccgagtagctgggatcacaggcatgcgccaccaggcccggctaatttttgtattttttgtagagatggtgtttcaacatgatggccgggttggtcttgaactcctggcctcaagtgatccgcctgcctcggcctcccaaagtgctgggattacaggtgtgagccaccaagcccagccacatacaggaagccctccatttctaatggtaaataaattaatacgtaaataggaatagctcttcatgaacagagggaaggtacagcattaggatggggagtcacagttcctgctgttctgaaagacatagggcaggcagcccgtaaaaggggccatgagtgaggcagtggcttccagtctgttccaccctccaaaggaaacttaacattcctgaactgtacacttagaaatggttaagatggtaaatgttacatgatgtgtctttcaaccacaataaaaattttttaatttttaaaagacaaaaaccaagacagagccctcagtcacagagatgagatcaccggcagacaccgcatgctttcacagctgttggtgctaagaagctgagcgctgcaggtctttctcgggggcctgggatcctctcctggccatcggacttgctgactcagtgccttcagaagcccagaaatgttcacaacggaaacaaacacttggcacttcgggcttgttctttctgactgtggctgtgaatggaatgcagaatctctctcgaccacagtacaccccaattacagcatctggtcctgtgctccctgactcctctctgcgaggtccccaggcccctcagtcccagctcttccagtgaggcctggacataacccctggtggaaaagagccatcacattttaaagtataagatctcttggcactgtttcccatgacaaagtagctctttttcaaagtccacacaatgcgctgggtgacagggagaaacccttcaccacagtgattgccactggcaaagtgcttgatgacagaggtgactgcatgactcctcagtcacatgacatatcttcatgtcctctccctgcacagatacccccacccagcccatgacctctccaagaagggagcaaaccaaccgtgtaaacatgggacgaaagtgcttgggacctttatttgagagcaagagtgttattcatgtcaggatttaagccacataaacgtgaggaaatgtgacagtctgaaagtgaagggaaggtgaggaggcctgatgttacttggagggaccatgctcacttcctttagaaggaattctgtacttagaagacagccctcgttttttttcttctttctggacgcagtagcttatctttccagccacaacatcctctgttttaaaaataacacttcaagtgctgagagaggcttttcacaaagcaatcagaacatcagggaggaaagaatggtaacatgcaaagtggctggaaagaagcgagaaagcaagggacacatttgggggtccacgtgcttgcaagctctcaccgtttcctcttctattctgaataaccaacacaagcagcaaaaaccacagaatgtgacctaaagatgcaagatttaaactgcagccctttaataatccaactcctgacacttagttgtccaggtaggcaactcccaattccagtgaagggccacagcctttgtaaaaggtgttcattagaagaggcgtttcatccaagtgctgtggccactcacactgagacagaagagctgacacaatcatcctataaaatgttctgaacaacatcaaactagaacaattccagaacaattctagaacaactgctggaacaattctatctgaaggagagccaaggagggagctattcccgttcacttaccctcacagcccagtgggcctctgcagagggcggtgtgaccatcagagggctgctggtgtcgtgctgagaagagagagaaacattcctttgtggctggcacagaattaaatcataggtgggtgggtttgctgaaaaggatacacgtttcaaagtgctttcaaaaaagggaagacttcacaaagttaaacacagaatcaccacatgacccagcaattccactcctacgtattgacccaaatgaattaaaaacggatgtccaaacaaatccttgtacatgaatgctggtagcagcactattcacaacagtcaaaagggtggaaataacccacatgtccagagagatgaatggataaagatgtggtccatccagtaaatggaatatggaaacactgatccattctacaacatggatgaaccctgaaaacacgatgctgagagagaggccagacacaaaagaccatgttagagaattccattgataggaaatgtccagaacaggcaaatccattgacagaaataaaattagtggttgccagcgactgggagggggagacaaggagtgattacttaatgtggatggggtctccttgcggagggatgaaaaagttctggagctagacagaggtaatgaagacacaacactgtaaatgcactaaataccactaaatagttcactttaaaattattaattttctattatgtgaatttcaccacaataaaaggggaaggctagagaaaacatggaaatatacatgcacatacacacatgcacatacacacacacacacatctggtattagaagaatgtgaacttgaaggacttggacactcacaaatttaggcggtggcatgctcaaattcagattgctcaaggtaacttcatggccactctgtgcacaggccaccagtctcagtgcaacatagaaaccctgcaagtccaaagaaagggaaggagtaaacagcatatcgccagtgagggtagggggagctgtctctaacagcaggcttcagggaaagaggatgtgcacttcaacaatgaaggccgtccgtgcaaaaaccccttggagcgttgggctgaactggactcaccttggggacatcgcttaaatgaatacactaaaatggacttatcctggccaggtgtggtggctcatgtctgtaatcctagcactttgggagaccgaggcaggtggatcacctgaggtcaggagttcgagaccagcctggccaacatggcgaaacctcatttctactaaaaacataaaaatcagccaggcgtggtggcaggtgcctgaaatcccagctacttgggaggctgaggcaggagaatcacttgaacccagagggtggaggctgcagtgagccaagatcatgccacttcactccaggctgggcaaaaagagcaaaactccgtctcaaaataaataaataaaataaaataaaatggacttattccactgcatctggaaatctgtaaaatttcagatgcatatattttccaaaaactatgagctcccaacatttaggaaatgttaggttgtataaagcaacaaaattaaacatggttaaggttacgaatgatggaccaaatatgtgccgaatttttgtttgttttagagatagggtctcactctgtcacccagagtgcagtggcgcaatcacagctcactgcaacctcaaactcatgggctcaagcgatcctcctgcctcagcctcctgagtagctgggaccacaggtgtgcaccactatgcccagctaagtttttatttatttttttagaggtgggatctcactatgttgcccaggctggtctcaaattcctgtcctcctgccttagcttcctgagtagctaggattacaggtatgagccactgcacctggctatgtgttgaattttttttaaagcagtcgtaaatacacacggttggtcagaaactcatatctgtggttcaccacgatcccctcggcctcgttgaatggaacatcccctgcccacccccagtggcctgacgtggaccccacctagacacgggaaggaagttgaactaggctgtcaggtgcctccctcctaacccaggacccaccacacaaaggctcagtggacttgtgagggatcacttagcttgttttttttctgtttttttttttttttattaactggcctaagaacatggatacttttaaagctataaatactgttaacagttttaaaagtgtcttcaaagaggtaagtgctaggatcggcctttctcagcctgctgtcctcagaagcccttgcagagtgtagaggatcataagagggttttgagaaaaggggacctttcatccctgcaaggtctgagaaaagagaaaaattaataaatagtaaagaaaaaaagaaaaaggaattaagtaagtttagaggaactgcattaagcaaagtcaaatttattttccataggaattctcagaacttttaacatgcagacatgaggccgggcacggtggctcatgcctataatcccagcacttagggaggccaagatgggaggattgcttgagcacaggagtttgagaccaacctgggcatagtgagacctcgtctctacaaaaaaaataataaaaattagccaggtgtggcagtgtgtgcctgtggcctcaggtacacgagaggctgaggcagaagatcacttgaacccagaagatcgaggctgcagtaagcagtgatcgcaccactgcactccagcctgggcaacagagcgaggctcaaaaaataaaaaataaaaaaacaaaacaacaaacatgcagacatgcaccatgaacctcaaagaagggaggtacaagtgaagggggcttcctggacagactggatcacaagtcatggcacagcacaaacaaggtcccttctaacaaaatggccatctacgaccacttaaaatcacttataagtacaggctgagtattcctcatcccaaatgcttggtatcagaagagtttcagatttcagattttttttttttttttttcagatggggttttcactgtggaggctaaggcatgagaatcttgtgaatccagagggcagaggctgcagtgagccaagatcatgtcactgcactccagcctgggcaagagttagactctgtctccaaaaaaaaaaaaaaaaaactctgattaaggcctttagtcaaagttacaccaatgtctactttgttacattaataacaccaatgtggctgggcgtggtggctcatgcccataatcccagcagtttgggaggccgaggtgggcagatcacctgaggtcaggagttcgagaccagcctggccaagatagtgaaacactatctctactaaaaatacaaaaattagccaggcatgatggttctcgcctgtaatcccagctactccagaggctgaggcaggggaatcacttgatcctgggaggtggaggttgcagtgagccgagattgcaccactgcactccagcctgggcaacagagtgagactccatgtcaaaaaaataaaaaataacaccaatgttattttctggctctgatcactgtgctgtggttatgtaagacaccatcactggggagagctggcaaaagatacacaggaaccctccaagctatttgtgcaacttccacgagagactggtccaaaataaaaagtctggacaacactttaatcacatgtaaggttacaaaacattaaaagaaaaataaataaataaataaataaaagatacactagccatgaaagatggctccaagtgtttaaaagacctttatttcaaaatgaaaacttcccgtgttaagtttgacagccgtgctcatgcctagtaatacttgacagtggaggaatgtggaaggagccgtggaggtcacccagcctgggggctctgcccagcccctccatttgctctgtgtacatgtgtatatacctgtttgtccaagaaccctttaccttctggatcggccaagtcccatatctgcggaaacacaaaaatgctcataagcatgactgccgatcactgtccacgtgttaacaaaaaccagagccgccaccaccccatcactggccttgcggggcaggagtgactgtccccaggttgtcctgcagatgaagaagccaattcagagcaggtgaatgatctgcccaggggcgcacagccagtcagcggcagggcccagaggacatccaggtgcactcagctcccaagccaatggtgtttatgacacccttcttcccccaactaaagtccgcaagtggccaagcgcggtggttcacgcctgtaatcccagcactttgggaggccaaggtgggcgattcacctgaggtcaggagtgcgagaccagtctggctaacacagtgaaaccccgtccctactaaaaatacaaaaaattagccgggcgtggtggcaggtgcctgtagccccagctactcgggaggctgaggcaggagaatggcgtgaacccagaaggtggagcttgcagtgagctgagatcacgctactgcactccagcctgggcgacagagcgagactgtctcaaaaaaaaaattagccgggtgtggtagcatgtgcctgtaatcccagctattcaagaggctgaggcaggagaatcacttgaacccgggaggaggaggttgcagtgagccgagatcgcgccgctgcattccagcctaggcaacaagagcgaaactctgtctcaaaaaaaaaaaaaaaaaaaaaagtccacaagctatcaagaccccaaaagtactcgggtttcttatctgctaccaaagtagtggtgggggctgccacctgggcatttggatccaccagctgcagcctgagaggtctgcagcgaccaggccactacccaggaggccgggccccatggaaggaggcctgcacaggctggccctgacctgcggggggagctgtgagggcagccacagaagagaaatcactattcatcttcacataccttcccaaggataatgtccgagaggccagacttctttagaaaaagcgcagcttcactcgcccccaccctccctgtgtatgccggatcgacctgaaatgggagaccaagaggcaaaataacttttcagcaaatgcagcagcaggtgaagtggcacccgccacgctaactatccgctgacagtgaacagaaaaggacaaaaggccgctcagccgggcttctattctgtactgtgctttcagctcaggcatgctctagttccatctgaagagacatcagctaaacttacctgcttgtaataagattcatacaacgaatttccagtgggaatctgtaaatgaaaccacagatattggtcaaaagtgaacacaaccccttggggaaaaaaagggttgccccctcaattttgtcatgaccaaaatatatgatgatagttagagtcaaaatgcatgcactttaaacatcctctgaacacagaattcagtttatcttcagacacagatattattatgcttacctgatttagaaaaagtaagcttaatgttctttaataaatcctgattctagggcaaacaatatagtcactcaggaaacagcagcagcagcccagtgtcaatttccattcactgagcaaagggatttcagctcctggagagctcagagggaaaggacactctatcctctgagattgttctctggctccggaatcagaaaagaagtttccacgcattatcataaatcaccaggcctgcaagctttcgaccagtttccctggcctgggtctggttctcaaccatcccatccatcctcctccagctacctgagtgctcagagacgcacactgaccagcccgcgcccggagagcgctggccagtaactgttcccaccagggaaggaaggaagtgcagtgtcctcagcttggcactgaagatattccatttcccgacacctcagagccccaagacatcgctgtttggaggtcacttccccatctagggtcacgcagctaatcggggccaccagaggccacacctggatccagcctggctggcggccaagtccagacacttcccgctgtgtcctgagctctgccagacgtctcccagggaaggggagggacacccaggggagtgtgccaacctggtggggaattatgcagtccctgaaatgctggctgtaaaagtttacgtgcgttggtgttttagtaagtgaggtgaaaaaagagcacacaaacctgccgctgatgtaataagcgataaaagtgaagaatgcacaatgacacctaattatacagaatggatgtgtaaacagctaaagagaatagaactgggcagggaaaagaggactatcttgggggcaggattacagtgtttatccaacaaattctgggactgctgttgtacgatttctcacaatgaataaaaccagggggacgtagactccttccagttatagtcattggatttgaaccaatacgcacccaccacttgcatattgttgtgctacaaagggtcatttgaagctaaaaataatgcccaggccgggcgcagtggctcacgcctataatcccagtactttgtgaggccaaggcaggcagatcacctgaggtcaggagttcgagacctggccaacatgacaaagcgagacaccatctctacaacaaatacaaaaattagccaggcgtggtggcatgcacctgtaatcccagctacttgggaggctgaggcaggagaatcgcttgaacccaggaggcggaggttgcagtgagccgagatcgtaccactgcactccagcctgggtgacaagagtgaaactctgtctcaaaaataaaaagaaaaaaataataatgcccggattatggtcagcgtctctgggggacgccaacacctgtgaatgtataaagaagtgaaagttgtaatcccaaacagcactttgggaggccgaggcaggcagatcacgaggtcaggagctcaagatcagtctggccaacatagtgaaaccccgtctctactaaaaatacagaaaattagtcaggtgtggtggtgtgcgcctgtaatcccagctactcaggaggctgagacaggagaattgcattaatccgggaggcagagattgcagtgagccgagatcgcgccactgcactccagcccaggcgacggtgcgagactccgtctcaaaaaaaaaaaaaaaaaaaagaagtgaaagtacagagaaaactaccatgacaaaatgaaaatagaaggaaaatagcataaagatctgaaaggggagagggaaaaagtcaaaaaaaaaaaaaagaggaaaagaaagggggaaacactgaaaaggcagaaaaaactagaataacatgaaaaagcaagaaaagccagagatttaggagccatcattttaaaacagacaaagacatcatggaaaagacataggaggtaagtgtgtatagcaacagcagccccaagatggctgcccccctcgtgcttggaggcagtgacaccattcctgggtgaggggtacaggaaggagtggctatcacccttagcatcttacaacctcgttagatgacagtgtccagccatcacacctgtgtcaacttctgggctcaaactccagcttatttccaaaatatgtctccccagaggaagaagacccacagaaaggaggccaaggcaggcaggctgtttgtcatctgtcagtaaaggtgacagtggtcaggtctaggcagcaaacagcacatcgcctgccatgggttcacagactccagaggccctcacttcagatgacaaaggtgcccttcctgccaatgatcagagaggtctggatctgaagcacatttccagacaagtttttttttttttttttgagacagggtcttgttctgtcacccaagctggagagcagtggcgcaatctcagctcattgcaatctctgactcctggattcaagccattctcctacctcagcctcccgagtagctgggactacaggtgcgtgccaccatgcccacttaatttctgtattttcagtagaagcgaggtttcaccatattggccaggctggtcctgacctcaggtgatccgcctgctttggcctcccaaagtgctgggattacaggcatgagccaccacgcccagccccaggcgagttttttaacaatctcatgggaagcaagggaaagaggtttccaagctactgtgattccagtggaaaaaaaagagtttcagtctttgaggcatgcagggttattaaatatctgctctacttcccaggcgctaatgagcaacaagatccgcaaccaagagaaacaaggcctggactaatccagaagagtcgctgaaggacacagcccagagctccaacctctgcccatccatgctaaaggctcatccggctcgaacacttgatgaccaccggatgtcactctcaaaagacctacagctgagggaaagcccagggagtatggctcaaccattgctcatcaccacgggagtccatctgggtaacctggaacaatgacagtggtcagaggttttgatctaattacacatatgtcaggttttgcatatgcaaaagcagaagggggaagaaagaaggtacagcaccaggccccaactgccacttcctcttatgccaggcttcttcccaggaacaatggactcacacctgcacgctgccctgatatgtcattgcgacagaactgaagacacatgttgctaatgacataaatccccagccccaggcagtctgtcactggcccctgtgcagagacctcttggcccccaaaaggaagattcacagctactgggaaagagccctctgtatgctgagagcagcctctggagctgcccacccatgtctgaccccaaagtgagcctggggccaagcccgaggcaacagcagagaggggacgcaccaggggatgaggcctgcaccgtaagaggctgcaggtggcaccaggatggccgtaggaatggaaggaagtgcagcagagctgacccgatgtgttctcctgacccagcccactgtgctgagaagacgccatcttcgcctctgcagtgtgtgaattgttgatgaggttcagtgtagctttcagctcggtctttcagttgctcttcctaactcaaaatgctaagagacaacatgcaaagttcctgtggcctcctcacttatcctccagcccagaaacaatttacaagtgggatgacagagagaggggcacaaggagaaggacaagttcacatccttctgctctgaaggctttaaaacaccgcaattcacacaagcgcctgtaactgtaacccaggacaacagcagttgagatggagaaacccagcagaaccacctcggaggagaaactgtctcaggattgtgttctaacgactcctaagcagggttcacccaactctgatccccgcacgtggccgagggcaggacgcctcctacatcttcatgcctggctgcctcctgcccaaactctcactctcactctgctagcaaagtacgcgctcttgtgcaaaacaaaccaatgatcatcagccttggttcaaaatgacttttggaaagcaatccattttcactgtaaaatgttcagagaagtacctataatcccttgtttcctatccagtacctctcatcctcccgacaacgctaaagggcaggtaatattactagtccagttgacaggtggggaaactgagtttgccctactcaggaccacaacagccaatgagcaacagtcagtgaagcacccaggataggtggtcctggagtcagaccctcacctactgtgcaccctgtaatgacagcccaggtgtcacagggctgtgcaccggaccacaggacagcctcatgcatatgctggcctgggaaaatgcacgtccgtgatgacgtgctggagcattttattaaacagaagaggtcaaaaggcaacactcaatttgagcatataaatggacttgaaagccagtgttttcgatgacctgccatttccccaggaaagctgagaccccataatggctatgtttttcaatgccactgccaagttttgcaggaagttaggcatataacactgaaacacatctcagtctgagttcctacttagaaaaacatatggatgcaaaaacatagcccggagtagagcttgcttgataatccttccatttctgccttccccttagaggcccccacaggccttgcacaaccatcacccaatgtgagcccagccctcccagcaggccggcccacattctgcgggtgagataacctggctcagtcatgtggcaagcacggggcagaactgggacttgactcaaaacattcaaaaggcatcagggaaacgctggggtatgtctaaccttcctggactggatgggcagctctctccaactgctccatcagaggtttctacagcagagctaaggtaaatgttaccaagagaaggagaagacttggcaagtgaaaagagagcttttccaaatcacaaggaaaaagacatctcaattaaaaatgagcaaagagagaggcaattcagaaagaagagatgcagcaaagttagaaagaaaatgttccatctcactagtaatttaagtattacagggccaggcactctggctcacacctgtaatcccagcacttagggaggccaaggtgggtgaatcacctgaggtcaggagttcaagaccagcctggccaacatgatgaaaccccatcactactaaaaatacaaaaattagccaggcatggtggcaggtgcctgtaatcccagttactcaggaggctgaggcaggagaatcacttgaacctgggaggcggaggctgcagtgagccgagatcataccactgcactccagcctgagcgacagagcaagacttcatcttcggaaaaaaaaaaaaaggcagagaagctaaaacaattctgaaaaagaataataaagtggaaagagtcagtctacctgatttcaagactgactctatagctagagtagttaagacagtggagtattggcagggggcgggcacagacagtaatgcacagaacagaatgtagaatctgagaaacagacacacacagatctgcccagtggatttcttgacaaaggtgcaaaagtatttcaggaggaaggaaagcctttccacaaagggcactggagcaatcggcatccataggaaaaacatgggcctcgaactaaaagtcttatgcctcgtacaaaatgtaactcaaagtggatcatgaattcaaatgtaaaacataatcctcaggatctagggcaaagcaaagagttcttagacttgacaccaaaagcccgattcacaaaaggaaagattggcagacaaactttatgtttgcactgtgaaagagccatgtaaggcctggcgtggtggttcatgcctgtaatcccagcactttgggaggccgaggcaggaggatcaccagagtttgggagttcaagaccagtctgacctacatggagaaaccccatctctactaaaaatgtaaaattagccaggcatggtggcgcatgcctgtaatcccagctactcgggaggctgaggcaggagaatcgcttgaacccgggagatggaggttgaggtgagccgagatcacaccattgcaccattgcactccagcctgggcaataagagcaaaattccgtattaaaaaaaaagggggggggagaaaggccgggcgcggtggctcacacctgtaatcccagcacattgggaggccaaggtaggcggatcacctggggtcaggagttcaagaccagcctggctaacatggctaaaaatacaaaaaaattagctgggtgtagtggtgtgcacctgtaatcccagctacccaggaggctaagccaggagaactgcttgaacccagcgggcagaggctgcagtgagccgagattgtgccactgcactctagcctgggtgacagagcaagactccgtctcaaaaaaaaaagccagataaaaaggtgaaaaggcaagctacagactagaaagaaaggtttgcaaagcacatatccaacaaatgactactatctaaaatatatactagagagctctcaaattcaacagcataaaaaagaaaacaatcaaattagaacatgggcaagccaggcatggtggtgcgtacctgtagtcccagcactttgggaggccaaagcaggaggactgcttgagcccaggagttccagaccagcctgggcaacatagtgagaccccatctctacatgaaattaaaaaactagccaggcgtcgtggtgcacacctgtagtcccagctactcaggaagccaaagcaggaggattgcttgatcccaggagttcaagaccagcctgggcaacataacaagatctgatttcttaaaaaacaaacaaacaaacaaacaaacaaacaaaaaaacacgaagaagaaaagaacatgggcaaaagatctgaaggcaaaaagacattttaccaaagaggaaatatagcagatggcaaataaacgtatgaaaatatgtttaacatcattagcaaaaagaagaatgcaaattaaaaccacagtgagatgccactgcacgctatcagagtggctaaaataacaaatagtgacaacatcaaatgctggtgaggatgcaggcaaactgggccactcatacactgctgatgggaaagttaaaaggtacggtgactctggaaacagactggcagtttcttaaaacaacaacaacaaaaaaaaactaaacacaacatgaaactaccgcatgaaccagcaactgtcctgggcatttacccgggagaaatgaagagtcatgttcataccacatcctgtatgcagtgttggccacagctttatatgtcactgctccaaactggtaacaccccggatgtcctccaataagtgagtggttcagcaaactgtggtccaagcacaccatggaatactactcagcaatgaaaaggaatgaacagctgacacatatgcaataatctggatgactctccagagaattatgctgaatgacaaaggccaaacctcaaaggttacatactgaataattccatcacataacatcattaaaatgataaaattgtagaaatgaacagagtggtggttgccggggataaggaagagatgggctgggagggaagtgggtgtggctataaaagggcaacaggagggacgtgttctgtacctggctatcaacaagaccctatctctacaaaaaaaaaaaaatagccacgcatggtggcacatgcctgtggtcccagctactcaggaggctgaggcagaaggattacctgagcccaggagttcaaggctgcagtgagctatgatcgtgctactgcactccagcctgggcaacagagctgtctcttaaaaaagaaaaaaaaagctttcaaaccttgattccgtgctctgatgccctccccagtccatgtcattcaccttgctgctttgctgaatgtctaaactctcaggggtggttctattgcttctcggttcctctccagggcagggaacgcatgccttacccctgtgtcatgccccactgcaggccctgagttctgtctgggctggacggaggccgtgagccccaggcatgtccatcttctttttttttttttttttttttgagacggagtctcactttgttgcccaggctggagtgcaatggtgcgatctcggctcactgcaacctccgcctcccaggttcaagtgattctcctgcctcagcctcccaagtagctgggattacagatgcatgccaacacacctggctaaatttttgtattttttagtagagacagggtttcaccatgttggccaggatggtctcgccctcctgacctcaggtgatccacccgcctcagcctcccaaagtgctgggattacaggcgtgagccaccacgcctggccagggcatgtccaacttctgctggtctcgcaaggtggtcatttgggtccccagagaatccaggactcttccttcagaacctgaacatagccatcatcatcaatatcccagatgcaatactgtaccaccattatgcaaatgttgcttcagaggaaactggataaatggtacaggctcttttttttttgagacaagagtctcgctctgttgcccaggctggatggcagtggtgcaatcttggctcactacaacctccgcctcccaggttcaagcaattctcctgcctcagcctcccgagtagctgggattacaggcacccaccaccgtgcccggctagtttttatacttttagtagagaccgggtctcaccacgttggccaggctggtcttgaactcctgacctcaggtgatctgcctgcctcggcctcccaaagtgctgggattacaggcgtgagccaccgcgcccgcccagactctccaacaactgcaagtgagtctaccatcatctcaaaatgagaagttttgttttttctttaaagacttaggaaacctaatgaccaaatgcaaggtgacatttgcagacaatcagggaaatgtgaatatggtcttgttatcagataataccaataccaaaggcgttattattagttgtgtaaggtgtgataaggcattgtggttatgtaaaggaaaacggtcttaactgttagaggtgcatgttgaaatacaatttcttttatttatttattttattttttttattttttttgagatggagttttgctctgtcgcccaggctggagtgcagtggtgagatctccactcactgcaagctccacctcccgggttcacgccattctcctgcctcagcctcccaagtagctgagactacaggtgcccgccacctcactcgtctaattttttgtattttttagtagagacagggtttcaccatgttagccaggatggtctcgatctcctgacctcgtgatccacccgcctcggcctgccagagtgctgggattacaggcgtgagccaccgcgcctggcctacaatttctaagattaaaaaaaaacaggccaggcacggtggctcacacctgtaatcctagcactttgggaggtcgaggcaggcagttacctgaggctgggagttcaagaccagcctggccaacatggtgaaaccctgtctctactaaaaatacaaaaaaattagctgggtgcggtggcgtgcacctgtaatcccagttactctggaggctgaggcaggagaaatgcttaaacccaggaggcgtaggttgcagtgagccaagatcacgccactgcactccagcctgggctacagagtgagacttcgtctcaaaaaaaaaaaaccacacaacaggaggctgggtgcagtggctcacgcctgtcatcccagcactttgggaggctgaggtgggtagatcacctgaggtcaggagttctaaaccagcctggccaacatggtgaaaccccatctctactaaaaatataaaaattagccaagcgtggtggcaggcacctggaatcccagctactcaggaggctgcggcaggagaatcacttgaacccgggaggcagagtttgcagcgagctgagattatgctactgcactccagcctgggcaacaggagtgaaattccatctcgaaaaaaaaaaaaaaacacaagccagagccaggtgtagtggcactcgcctgtagtcccagctactcgagaagctaaggcaggaggattgcctgaggccaggaattccaggctgcagtgagctatgatcactgggcctctgaatggctactgcactccggcctgcacaacatagcaaaatgtcatctgaaaaaaaaaaaaaaaaaacctaagaactaaaaatatacgtaggtgggggaaaagatcaaagggtggtacaaagaaatctgcaaaatattgataactgttgtaaatgggcagtgggtacatgggaattcattaaacccttccctctacatctattttatttttttatttttttattttttttgagatggagtctcgctctgtcccccaagctggagcgcagtggcacgatcttggctcactgcaagctccgcctccccggttcatgccattctcctgcctcagcctcccgaatagctaggactacaggtgcccaccaccatgcccagctaatttttttgtatttttcttagtagagacggggtttcaccgtgttagtcaggatggcctcgatctcctgacctcatgatctgcccgcctcggtctcccaaagtgctgggattacaggtgtgagccaccgcgcccgggctttattttatttttcatagagacagagacttgctctgtcacccaggctagagtacagtggtgccatcatagctcactgcagcctcaacctcctggacttaagggatcctccttccttagccttccaagtagctgggtctataagtgcatgccaccacacccagctaattactattttttattttttgtagagacggggtcttgctttgttgcccaggccagtctctaactcctgggttcaaaagatcttcccaccggggcctcccacggtgctgggattataggtgtgagcatgcccagccatcaacttttaatgtgtttaaaggccatttgggctgggcacagtggctcatgcctgtaatcccaacactttgggaggccgaggtgggcggatcatgaggtcaggagatcgagaccatcctggctaacacggtgaaaccccgtctccactaaaaatacaaaaaattagcccagcgtggtggcaggcgcctgcagtcccagctactcgggaggctgaagcaggagaatggcgtgaacccgggaggcggatcttgcagtgagccgacatcgagccactgcactccagcctgggcgacagagcgagactccatctcaaaaaaaagaaaaaaaaaatgacttatcgggtactatgttcactaccagggtgacaggatccgtattccaaacctcagcatcatgcaatactctcatgtaacaaatatgcacatgtactctctgtatctacaataaaaaaagctgaaatccaagaaagaaaaaagaattcctataaaaaaaaaaaaaaggccatttgatgtgcttctgccttggcaaggaccctaatggcacaagctgcgtcaggtttaagtgtgacaaatgaggagagcttggtgacaggatcgtgcttctgtgaaacaatacaaactggcattcctttagaacacacacaagtgtgccctaccatggctacaaggtctgctcctgggagactgagaagtgatgcaggagtgggggaagggtaagagggttcgctgttttccccccttgagggcacagatgcagactgcaaggcactggaaacagcagaggactggttaagctgctaataaattgctgagtctccatgggacagaataaataccttacagccatcaaaacagcagaatgtttacaaatggggtccaatcttcatcagcttgctaaatgagaagggggcaatctagcaggtgcagtgtgtgacctggcttataagcacacggtatcctatcgccccgctactggaacctggcgggacagggccatgcttaccaggatttctacgggccagctagtttgcttcctcatggcttcctatgttccctggtgtactatgtcagcatgagctgcttttgtaaattagacagaaatagaaagatgtgcaaggaaaagcaggatctgaaggaattttcatggattctccccagggacccaaatgagtgccttgtgagaccagcagaagacgaacatgctcggggctcaaggcctccatccaaaccagacagaactcagggcctacagtggggcatggcacaggggtaaggcctacagtcgctgccctggagaggaaccaacaagcaagagaactgccccgagcatttagacatgcagcaaagcagcaaggtcaatgacatggaccaggaaggtcgtcagaacacagaatcaaggtttgaaagctttcttttttcttttttttttttttaagagacagctctgggccaggcatggtggctcacacctgtaaccccagcacttttgggggctaaggtgggtggatcacctgaggtcagcagtttgagaccagcctggccaacatggtaaaagcctgtctctactaaaaatataaaattagccaggtgtggtggcgcacacctgtaatcccagctacttgggaggctgaggcaggagaattgcttgaactagggaggcagaggctgcagtgagccaggatcacatcattgcactccagcctgggcaacaagagcgaaactccatctcaaaaaaaaaaagagagacagctctgttgtccaggctggagtgcagtggcacgaccatagctcactgtagcctcaaattcctgggcttaagtgatcctcctgccttagcctcctgagtaattgggaccatagccatgcaccaccatgtgtggctaattttttttttcttttttttgtaaagattgggggggtctcattattttgccaggctggtcttgaactcctggcctcaagcaatcctcctgccttggcctcccaaagtgctgggattacaggcatgagcaccaaactcagcattccagaaacagaactgctggagaaaaaacattgcctgcagcaggcttcctgcctcgatgcactgccctgtggaggatgcaggactatgctgagccctaaacgtcttcaggagagactgcccagctccatctacacctatgggctgtgttctcccatcttgcttcactaagagaagctgtctcatgtggaggtcaacagtgctgccagacaaatgtggatttgagtcctgtcctgctgctggaatgctgtgcaaccctggggcaggacgagcagcctctctgtgcctcagcttctgcatctggagatgagggtgagcactcccacccccggggacttgtcaatcaccggctgttgtgattcctggtatcctcctcatcgccctccttccactggctccaggtaaaaatgtaccctctccccagaaacatccctccatctctcttccacctccagctactgacctccccccacccttcgcataaaacctcctgaaagccaggcgcagtggatcacacctataattccagcaatatgggagaccaagacgggtggatcacctgaggtcaggagttcgagaccagcctgaccaacatggagaaatcttgtctctactaaaaatataaaattagctaggcatggtggcacaggcctgtaatcccagctactcaggaggctgaggcagaagaatcatttgaacccaggaggcagaggttgcagcgagccgaggttgtgccattgcactccagcctgggcaacaagaggaaaaccctgtctcaaacaaacaaacaaaaaaccctcctgaaaaagggtccacccttggattccccagctctcccttctttggacctggaaatttatttgtttgctcactcaatcaacacatgctgaactcgtgctaagaggcagcactgaggatacaaaagtgtgtaggacagagtcctgggcttcaggccaggcgtggtggctcacgcctgtaatctcagcactttgggaagccaaggtgggtggatcacatgaggtcaggagttcgagaccagcctggccaacatggtgaaactctatctctactaaacatataaaaattagctgggcgtggtggcgggtacctgtaatctcagctacttgggaggctgaggcgggagaaccgcttgaacccaggaggctagaggttgcagtgagccaagatgatgccattgcactccagcctgggtgacaagagtgaaactccatctcaaaacaaaaacaaaaacaaaacaaacaaaaaatagagtcctgggcttcaggaagggcaggcgggacaaagtcagcccaggactatggcacaggggaccgcatgatatgactgcagcagtaggcacagtgaggggaactcagggcttggggccaggtgtgcaccgggacagagaagacaggtgagctgtgggtgattcagcacggccccagtcaggtggaagggcatgtgcataggatgccagggtctgtgcacgctgtgctgaaaagacaggatgtcatccccagggcaagcagaacatggggagggggtgcctgcaggccagcaaggtgggcgcatatgcatatgagatggtaaacggcagaaatccgctgcaaggagcagggctggaaggaagtgatcagagagagactgccatggccctccagcagcagaactccagcagcctggggactgcagcgactcacaatgcagacacccggagaaggaggacatgccagttccctaaaaacgaatgtgtttccttgggatgtccccaggggcattgaggtggaaatctaattgccattctagacaccttggtgcaggtgtggaggtgaacaacgggacattccccacccacagcctcatggagctgtgacaaagcacagagacggctgccaagagctagatggaagagacaggatggagggccagtccgcagccagcagcagacatacacccagggcaccaggagacctggaaggccccccctccatggctgagcctgtccagggagactcagtcaagcgaggctgtggagcacccgcaccaaagcagtgccagagacaggcttgccacggggagggagggaggaggctccaccacaggaaataccagggcagctgggtcctggagggatggaggggcgggcgtgtagggaagggctcaagggtcttgtgcagccatgcagagggcagaagggatggaactggaatggcgcccgggcaggaggggaacagattccagccctccctcctgaaaacgctgcttaagagcaaaagcagatgaagcctctgagcagccctcccagctgctgacctgtgtcccctggacatcacccctcccgggcatctcagagaacagacctattcagttccatctgtttccttcctctgacccatgagcggtctccctggagagacatgggagagcagtcacccaagactgggggggaggggggaacaccgagaggggctcaatgactcagcagtgtgtcctccgcagcaggaacacccaccgcctcccacaagggcccacttcccagagtctcccaactttccaaagtgtaccccgggccttcccaacattcctttcctgcatcagctactcctgggctccaatgtccctgccatctactactccctaacagagcacactgcccaggactcggttgggatgggtctggcctcctgtcggggtgttcctgacagtggggggtggctccctgccaaggacgccaagatcccctgcactggccaggtcagtgccatgccaccttcctcctcatcgctgtgggtgacagcgtcagcctcctagtgcactgttctttttctggcccctctaaacatcaggcacccctcgaggctcccggaccccacagtgagcagaaagatggttgctgccaccatggagcatcatagtcagggcatcaaagccagtgagctgacacacacaccaacacagaagagcaaatgcacagcaggggtgacaaggacaaggacaggggctctgtcctgatgggagggccgccccgcccccaccccgcttgccccatacatgcctctacagagcctggcccagcctcctcacccacggccctgccttcacccgcttccccactgcacctcgcacacagccactcctctgctcagaaaggctcttcagggtgtgtaacggaggctaaggtccaagccctgagcccagtcctgaaagtgctccctggccatctcctaccttgccgggctgatttcactccacacacacactcactcacacacactcagccacacacacatacacacaatcacacatgtacactcaggctcacccacatacactcacactcacatatatcacactcaagtctcacctccttcccccggctggcagagctctactgaacatatcgggcacctttcactccttgtcttggcacaagatgcagtcatgcatcgtttaactacagggatgcgtcctgagagttgcatcgtcaggttaatttcatcgtcgtgaggacatcctggagtgaacttacacaaacctagaaggcagcgcctgctccacgcctgggctgtggtctagcctattactcccaggctacaaacctgggcagcgtggcccggtacagaaaactgcaggcaactgtaacacaatgctaagtagctgcgtatctaaacatatctaaacatagcaaaggcacaggaaaaatacagcagtataatcttacgggagcactgtcacatatgcagtccatcatggttatgcggtgcgtgactgcattccctatgcttggggccgctgcctgctgcaggccaacgccctgctctaagatgaccctaggttcccccaaatgaaataagtccctcctgcctccacactcccatagccccaaactttgacaagggacacttcctgaagttgatttgatggaaaagctgctgtaatgaccggcccctctcactacattcttaatgcctggagggtggagggatcacgctgtgccctcctagaagcaggccttcagtaaatgtctgttgagggcatgggtgagattaaagtgttgagggaggcaggtggtgggctgagtgcaggaaggtgcagttggtagtggggagcgggcagacatagctctgtggctcagtagcagtgaggacaagccaccaagccaccctgggcctcagtgtccccatctgtaaaatgagaatagacagcacctggcctgaggatgctggtaagtcccaaatgagaatatgcaagtgaaatacactctgcaatgggaagccattattacatcccctattatggttactcttgtattattattcctgagacaggggagcaggccgtatttacaaagaatggtgggcggggagggaggtcaggcaaggctgtgaatcagcacgtgagttgcaggtgtaaaatcacagtccttatagcctgccctgccaattgatctttgccaagcaataaagtatttcaacaaatgttggctacactatggtacatatggtagccatttgctctctcaactcaacagctaagcagctcccaacatctaggatagaacaatatttcagtttgggaatggtggctcaggcctgtaatcccaacactttggagattaaggcaggaggatcccttaaggtcaggaattcaagaccagcctgggcaaaacagtgagaccctagccctacaaaaattaaaaatcagaaaattagctgggcgtggtggtgtgctgaggagcacctgcagtcccagctactaaggaggctgagacaggaggatgaacccaggagtctgaggctgcagtgagccgtgatggcaccactgcactccaacctgggcgacagagcctgtctctaaaaataaaaaaagaacagtgtttcaccaattctcttagtctcagctgtcattttcttaaaaaaaatacaattttacacacagcagataagtacacacctgtaaaaacccacttagtgtgaattaaaggacattttaaatgtgcattaaatgtgaattaaaggacattttctagtggctaagagtcaacaacaacaaattaaatcaataaagtcaactgactataaatgccaactcagaggctggcctaaaagaaaatgccaactccatggcctggtgtgagcaagcaaaataacagcaacaatttgcaccctggtgatggacaaccttgcccagcccatcagcaattgtggagcctgctcctccactccagaagcctcgacccacagagaaagtttccaaagccagcacgggggtgccgcgggcacagagcgttctagttctcagcaaagaaaaaactcaaagggaagaacgtttgcaagaacatgcgcctaggccaatcgtgtctgggaccccccaaccacaaacagtgccatttgtagggtgtggggggaattgagggggacagtccatccccataaccgtacagtcctggttaaacacgctcagtgtgagggcctcatcatcaagttttttcgtgtttcatctttcccctttggagagtgtgaaatgagatagttttctcttccactggaaaatataaaattgaaaagcacgtcctcttcagattaagaaaagccagctggggccaggcgcggtggctcacgcctgtaatcccagcactttgggaggccgaggcgggcggatcatgaggtcaggagatcgagaccatcctggctaacacggtgaaaccccgtctctactaaaaatacaaaaattagccgggcgtggtggcaggcgcctgtagtcccagctactcaggaggctgaggcaggagaatggcatgaacccgggagacggagcttgcagtgagccgagattgcgccactgcactccagcctgggcgacagagcaagactccgtctcttaaaaaaaaaaaaaaaaagaaagaaagaaaagccagctgggcatagtggctgacacatgcaatcccagcactttcggaggccgaggcaggtggatcgctttgagctcaggagttcgaaactggcctaggcaacatggagaaaccccatctctacaaaaaatacaaaaattggcagggtgtggtggcatacacgtgtggtcccagctactcggagggctgaggctggaaaatcacttgaacccaagaggcaaaggttgcggtgagctgagatcgcgccactgcactccagcctgggtcacagagtgagactctgtctcaaaaaaaagaaagaaagaaagaaagaaaagccagttttctacagattggcgtaatgacagaggcacacttgttgatgtcacttacacaagaggaaagccctttcctcaccctctgatgagcggaggtgaggaggtagcagggccccagccctggtggtgccctgactgctgtcaccggccagtgggctcgagcaggcggctctgggccctgtgcctgtttcttcacccaagagacaaaacgttcccttctgtcaactaccctcaaagacagctggagagacagactgcgctcctggctgctgttccaagtacccagcctccaatcaacagatatcaccagcctactatgtgccaggagcccagatttcaggggctgggaacccagcagggagcaggaaagacagagctcctcgaccctcccggagcccatggtgtggcaatcataggacaaaatggtggctttggagcccatggtctgattcagacgcctgttctccatgggggtctgaccagttgttttacctctctccctctcagtttcctcatctagaaacaagcacagggacaatggcaccattgttggtcccacaacattccctcactcctgcatcagacctgtgccccaaatctctccccagggcccagagctgcctgcctgggcccactcactggtgagggcagtcagggtaccaccagggctggggtcccgttgccacctgttctgggagaccaggttaccagaatcagggaagtgggggggagggcatggtggctcacacctgtaatcccagcactttggggggccaaggtgggtggatcactagaggccaggagttcgagaccagcctggccaacatggtgaaaccctgtctctactaaaaatacaaaaatacaaaaaaattagccaggcttggtggtgtgcacctgtaatcccagctacttgggaggctgaggcagaattgcttgagcccagatggcggaagctgcagtgagccaagatcatgccattacactccagcctgggtgacaaagcgggactccacctcaagaaaaaataaagtaaaacaaagaatcagggaagtgggactctgagaaggcagagagggggccaggaagctgtgaagatggtggtgggagacagggcctgtgcaaagggtgggggcaggacactggtccacgcagtgtacagccagtcagagaggctgcacccagctgcttcctccaggcctgttggaacagaggagggaaaagacaaaaggaggcacaggcgccctcttcctcctgtcctttattcccagcccagtggaggtgattcatcccaccgctgtgggtgccacctgacttccacgagtgtgtcacactatgtcctaattttctgtgtgcctgggtgcccagctgcagttgagctgacctggagggtggggctcggttttatttatcttggtcccaagacagcacacagtagctcagcagacagaatctcatggtgccccagccccagagctggtcttctttttgactgtacctaaatgtggggtctcacgtggcttggagggtttcctgcaaagtgatgggttttgactcaactgacacagccacagcccaccaggctctgcccaccaggcactcccactgctgctgtcctggctccctgaaggtggcctcaacctgacggttgcagacactatgcctgcttcttccccctgcttcctctcccacctagaccctcacctgtccaaacagctaccccacatattcctttcacccccagccctttctactcttcctgaaacaacctcaggccaggttcctcttgatcacttcatgcccatatcacagagactgtctcggagctagaacccagctccaagcactccctgtgtaagcagccagatcatctaaaggtgtcactcctcaagaacctgccatagctccctactgcctctcataatgtggcccatgctactcttccctcaacagatgattgttgagcacctgagtgccagctgcagcctggcaaacaaggatgaataaaacaggcacagtctctgcccttgtggacctagtctaggtggttggggaagacagaccatcaatcaaccccgcaaagagaaaattataaacggctaaatggaaaaggtgtccatctccaccagtggtaacagagatgctgggccagtttgtcaggaaaggcttccctgaggaagtgatgccccagctgatatgaaaaggtgtagggattcaccagaggatgaagggtttggaaagagcattccagagagagggaatagcagatgcaaacgccttgaggcaagatgaaggatcgcctgcgcagatgacagaaagaggggccagggggccacagagcagagggaatgaggactgcaggcctgggaaacacggggagcaggtgtgctgtcagctgccggtagcagcgcctgatccagcctggctggtgtgcccaagaggaggagaagtgactttatgtcagcctgacctgcaggcagtcagtaaacagattctgttatcaggtctacattccacaccacaggcagtgcagatggaaatccgagacaaatgtctgtggtcatctgtgacctttactttcaccccaaagcttgtagtatcaagagctgggactcctatgaagggaaaagcccaaagaagctttaagagctaatggtctgcactccatgcaggagcaaacttcagggccaccactctgaccagcggtaaaacccagtccagcgcgaaggacagtgggcaggtctcagctcctcagcccccaccagccactggccactctctcggcaagcagacatcctgtcagttcggccgatttgtagcccagacacaaactctcacgtcttatttaccaaaagaccttcctcctctcatccctgagctgcctaaattaaaggaaggacatgaaccccaaagtcccagccgcatgttttggccctttgacctagacctgcagcctctcagctctggctcagtcctctttgcctccgtgtgaaaggctattccccatggcctagaccaggggtgtccaatcttttggcttccctgggccacactagaattgtcttgggccacacataaaatacactaacactaacactaacactaacactaacactaacactaatgatagctgatgagctttaaaaaattcacgggtgggcatggtggctcacgcctgtaatcccagcactttgggaggccaaggcgggcagatcacaaggtcagatcgagaccatcctgcctaaccagtgaaaccccgtctctactaaaaatacaaaaaattagccaggtgtggtggcgggtgcctgtagtcccagctacgcaggaggctgaggcagtagaatggcatgaacccaggaggcggagcttgcagtgagccgaaattgcaccactgcactccagcctgggcaacagagcgagacttagtctcaaaaaaaaaaaaaaaattcacaagaaaacctcataatgttttaggaaagtttacaaatttgtgttgggctgcattcaaagccatcctgggccacatgcagccatgggttggacaagcttggcctacaccaaacacgccctctcctccatacaaccatgtccaacacccaaatggaagccagtcatctgcccctcctgcagcttggaccacccgtgacctgagcctctgctgtgggccgggcctggacaactcaattctgcatgggccaggagcactgattaccactctggcagggaaacctttggattctcctaaagacaactggctgggagtggtggctcacacctgtaatctcagcgctttggaggcagaggcaggaggatcacttgaggtcaggagttcgaaaccagcctgggcaacatagcaagatcctgtctctacaaaaaaattaaaaattagccaggtgtggtgttgcatgcctgtagtctcagttccttgagaggctgaggtgggaggctcacttgaggccaagagtcgaggctgcaatgagctttgattgcaccactgtactccagcgtaggcaatagagcaagagcctgtctctaaaggaaaaaggaagacaataagcaggcctttccatgtccctctctaccttttaatgagatgagattaaagtaataaaataaaaactcagactacatgatatctaataactaggtataaaaacaaatgaggttaggagatgtcataaacttaaaaacaaacaaacaaaaaaataactttccaagacaagaaactatggtgcaatgaagaggcctgaacctgtgtcagaaaagccatgtctgcctgagctcactgggtacaaacttgggcaagggacgtaacaatctctggcctcactttatctattttttttttttttttttttgagacagagtcttgctctgtcacccaggctggagtacagtggtgcaatctcggctcactgcaacctccacctctcaggtccaagcaattctcctgcctcagcctcctgaggagctgggactacaggcatgtgccaccacgcctggctaatttttgtattttagtagagacagggtttcagcatgttggccaggctggtcttgaactctcgacctccagtgatctgcccttcctggcctccagtgatctgcccctcttgcccctatacactgaagataatactggccagagtgaccgggaggatgaaccaggcaatctatgatgttttctttactcagtccttccagcctggtggtgagacctttcctgacctccatcatcagatcggaacctgccctgctctactcatctcacagcatcaatccccaccgaatgcactacacattgggctcatttctttatatctgggcccctcccaacgatgtcagccccgtgaggcggcactgccttcagattcactgttccatccactgcccagaaagtgtccagcaaaaagaagatgccaaataaatactcactgaacgaacagtgtgatctacaaaaggcaggcatgagggccaggcgcggtgcctcctgcctgtaatcccagcactttgggaggctgaggcagacagatcacttgaggtcaggagttcgagaccagcctaggcaacatagtgaaactccatctctactaaaaatacaaaaattagctgggtgtggtagtgggcgcctgtaatcccagctactcaggaggctgagacaggagaatcgcttgaatccaggaggcagaggttgcagtgagccaagacagcgccattgcactccatcctgggtgacaagagtgaaactctgtctcaaaaaaaaaaaaaaaaggaaagcactgagagcacatgcgtcacacggcagggtcctgacactctactgtgacaaagcaggtcaagcgagtccacagtaccattctgcagatgagaaaactaaggtacagaaagtatttgcaggactgagggcagtgaaggaatatctgggaatccaaacaaacatctaaggacctaaacattgaaaagcaggcaccactgcacctgatggtgcctgcttttcttttcttttttttttttttgagacgtagtgtcactttgttgcccaggctggagtgtgcagtggagtgatcttggctcactgcaacctccgcctcctgggttcaagtgattctcctgcctcagggtcccgagtggccgggattacaggcgtccgccaggacgccaggctaatgttttgtatttttagtagagatgaggtttcaccatgttggccaggctggtctcaaactcctgacctcaggtgatccacctgcctcagcctcccaaagtgctaggattacaggcgtcagccactgcacccggcctggaaagttgttttaaagttcagaatggaggtggaggggtcttgcccagggagaatctatttagtcgaaaaaacaacaacaacaacaaaaacaaaaaaaaaacaggccagtgcaggtcaataagtgacagtcagggaattctggatctttcaggagtggattttactctaaaacttcgttctcatcaatttagactgcattgccattagcattctactaagatagactagcacttatttcagaggaagaaaagaaacaagggacaagaggacaagtaagtgtccgagccactcagcattcattccagacacactggccgggtgctgctctgggagaggtgcccagcaggccatctggaacagcagggctctgcggcaggaggacgcaggtgtgacctcagctctgcgcccaccaactatgagacttcagcaagttactctatttctgtgggtcttggtttcctcacttgtaaaaggggaataaaagcctcctagaatggaggcacctactgaaatacagcaaaagctcctggatgaagaacacataacaagggggaaaggaggaaggtgtagctctttgggcccagggcagtctctcctcatcactgagcccagttaccacgcgcttcctaggtacagcggtcacaaaagggacccacggaaggtacaagggagagaactctcattcgggtggggctaagggaggacaacacaggggaggcctcaaagaccgtccttcagggcaggcagcatacggcaggagctcacagtgatgttctagcaaccggagcaacacagctaaggatgctgaggctagaaagtgttgccaagagccagaagtgcaggaaagggacccagcaaggttaggtggagtcgattcagggcttactaaggtcatcaaagctgactttttttgagactgagtctcaccctgttgcccaggctggggtgcagtggcgcgatctcagctcactgcaacctccgccgcctggtttcaagcgattcttgtgcctcagcctcccaagttgctgggattataggcgtttgccactatgcctggctaacttttgtatttttagtacagacagggttttgctatgttggccaggctggtctcgagctcctggcctcaagcaatccatccacctcagcctcctaaagtgctgggattataggcatgagccacagcgcccagccataaactgagttcttttggaggaaggggaatgggagctgtgaaaggtttttggaacaggggaatatgttttagaagatgaatcctagccagatgcagtggctgacaccgtaattccaatactttaggaggctgagatagaaggattgcttgaggctaggggtttaagacctgcctaggcagcatagcaagacttcatctcttcaaaaaaaaaattgtttaattagctgggtatgattggtgctgcgctcctgtagtcccagctacttgagaggccaaggtgggagaattgcttgagcccaggagtttgaggttgcagtgagctatgatcctaccactgcactccagcctgggggacagagcgagaccctgtctcaaaaatcaaaaagatgacttccacagtggcgtgggattaagtgggagggagtgggcaagtaggaagtagaatggcccagaccactttggggcatggcaaggaaatggcccattccagagtccagcaggctggcagaggtgcaggagagagacaccttctggactctagaaggcaggtttgaagtcctctgcacagaagctccaggggagggagcgcacagagagataagatgcaggtagggaggctgaaattaggggacaagaaggagagactgaaaggagagaggatgaagagtgaagaccgacgggctccagtgttgcggagttcgaggaggatcggctgcagccacagggcaccggggttaaggacggaggggccaccggtaacctcggggagtacaaggaggaaagagatctggatgcatttccacggaaggctttttggaaagcagaagagagctgagcagggggacagggagacacacaaatcactgagatgctgttgggaaaaaaaaatcactcctaaagaggcagaggtgcagacctttcgaatttacgttgatattcagggtcagaaaagagtatataaggaaggagattctgagatgatgtcatggagtacagaacagactgaaaaagatgctgatgggaaaagtgcagacaggagtgggggtggagaaaacacacccctcctcccctaggctagcccgctgggttatccactttgctcaccttcacctggccatctgcttgccaagtgtgctctgtcacctaaatccaaccagatcacagccacctgctgcagggtgcttcccttttgcccccaaccaaaaattttggaattatacccttggttcccccagagttatctgtgaacccaagtgatctcctgagctagacagtaagggcctgggagggccatgcctcacacctgggccaacagtaacccatggtgtagattttcactcgagagcaagtgtaaagaagtgctgacatttccaaacgaagaaaaccaggccacgccttcattcaacaaatgtatagggaaaggaacaggaagaggctaagaagtcagtgacctggccaggcgcagtggctaacgcctgtaatcccagcactttgggaggccaaggcgggtggatcactcgagttcaggagtttgacacgagcctcgccaaaatggtgaaaccccgtctccactaaaaaaaaaatacaaaaattagccgggtgtggtagcacgtgcctgtagtcccagctactcaggaggctgaggcaggagaatcacttgaactcgggaggcggaggttacagtgagctgagatcatgccactgcactccaccctgggtgacagagcaatactccatctcaaaaaaaaaaaaattggacaggaagttttagaaagatccacgcctcccaaactgggagtgcttagtgctttctcatgaaatgatcttaggtgattttcccccgactcccgccttccccgccccccaccccctgactacatactctaaactgtagcacttagctattaacacctattatcggtaggacacttaacagtttacagagcactttcatgtcagtaacaagaacttgctaattaataatcaccgggttttagcactgttaacttagtgacagtgttgcaaattggctagctgtgcacttctctctccttggatcagctaaccagtcatgcaagcatgcaaccggcctatcaactctctttgggtttggaattcttaattgctgcggtctctactcccaaacgtccaaatctggcagagattaaatgatgacagtaattataggatcactgagtgcctctcatatgctaggcactgttctaagcgctttttcacgtgcttaattttcacataatcccaacacatttttatatctccattttccaaaggaagcaactgatgggtggaatggctaagagcttcaaccaaaggcacagagaaatcggggctggagccaagatttgaacacatgatctgaccctgtgtcctcactcttaatcaccatgctgtgctagatcattctagcaaaatgcttatatggtgctttgcacaacacaggtattcagcaaataaaggcagctgtgattagcataacacaggtagtttctagttcccacgagtgtcacctccaggaaagcagcgaccttgtctgtctggaagaatgcagcgctcccagcacctgacccaacgcacatttgagggatggatagaaaatgaatgaatgaaagtctctcccaaataacagagctgcctacgcatggctctttttcgcatgtctgtgtcgcgctatcgatactgccccttcataagcgcatcaggcgaatttgaggacacagagaggcgcccggagacgtacgatctgcgcccggtgcaggggtggcggaagcagcttccaaggaggcaggggatcagtctgagatcgcactgctgctgacgggtccgggctccggcgggaccctgcccgcccgggcgccgggaccggagggagacaaagactcgctgggccgccgcgccgacagaaacgctcgcacccctcgcccacccctccgggatgcagcccagcgcctccgcgggtccccggcctgggagcttcagcggcggcagggtccgggccctgggcggagaggacacgcgctgcgcacctcctcgcctcgccggtgcccgcgagggtcgctcgggcacgggaggccgcgggtcccggcctgtcaccttcagggccgcctgcccacccgcccgccgcaagcccttcagcacgcgccgcccccgccgccgcctggctgagtctcccagcgcctcagcctcgccgcaccgctcgcctcgcgccccgcaccccggcgccgcccccaggcccgcccggcccgtacctgctgggagagggggatgagcggcgccgccatcttcccgcggactcgggctccgagcgccgggggaacgggggcggggctgcagccacgcgtgcgcactgggacgacgggagggcggtgcgcaggccgcctgtcccgggagagggcggggccgtagacagggccacgcatgtgcagtcaggccgggaggggcgggggcaggggcggggccgcccacacgcagcctggaggggctgggcctgaggcatctgcgtcttccgtgctctcttgcccgttcccctactcctccttccaacgttgttcggactctcatgccgctggccgctgtccgagtcgaccatgctgtgtcatccctccagcccatgccgaggcctggttctctgttagggatgccgtccccctgccagtgcgcctggggaggcggtcgcccaccccgcggagggtcgggaccctcaccctgccccgcaaagcgccctgttcctaggatcgcagtgtgtgtgtgtgtgtgtgtgtgtgtgtgtgcgcgctaatttgggggacccgcaccctgcccccctcaccctgccccgcaaggcgtcctcctggctgtggtggcgggcacctgaaatccaagctactcaggagactgaggcaggagaattgcttgagcccaggaagcagaggtttcagtgagccaagatcacaccattgcaatccagcctgggcaacagaagcgaaactctgtctcaaaaataaataaataaataagacaagaacccacttgttgccaggtacagtggcttacacctgtaatcccagcactttgggaggccgaggtgggagggtcatgaggtcaggagttggagaccagcctggccagtatggtgaaacatcaatatggtgaaaccccatctctactaaaaaaaatacaaaaattagcaggtgtggtggtgcatgcctgtagtcccagctactcaggaggctgaggccagagaatcacttgaacccgggaggtggaggttgcggtgagccaagattgcaccactgcactccagcctgggtgacagagtgagactctgtctcaaaacaaagtcaaaaacaaaaagaacccacttgtaactgttgctaatcaaagcatacattcagggcaacttgaatctgtgtctcctggactgcggtcctcaaccttggcccaaactctctacttatattaactttgcctcagcttcttttgttacatcaatagagtaatgaaggtttttaacagtcttgagtgctttatcagtacgtattccataaggaaaagagaagtccttctaggtacttcaaacagaggatattgaatacaggggattgagccaggctctgtggctcacacttgtaatcccagcaatccagttgagacaggtagattgataccagcctggccaacatggagaaaccccatctttactaaaaatacaaaaattaacccagtgcagtggcaggtgcctgtaatcccagctactcaggaggctgaggcaggagaattgcttgaacctgggaggggaaggttgcaataagctgagaactcaccattgcactccaacctaggtgacagagcgagactctgtctaaaaaataaataaataaaaataaatgaatacataaacgactacaggggactgagtataaaagtgttggaagtactggaagaacaaaagaggaaggtaagtttacctaaagattcataactatatgaggctgctagcctctctagagctgaaagattaaagcaggggaggtggctgggcatagtggctcacgcctgtaatcccagcactttgggaggccgaggtggatggatcacctgaggtcagaagtttgagaccagcctggccaacatgatgaaatcccgtgtctactaaaaatacaaaaattagccggttgtggtggtgggcacctgtaatcccagctactcgggaggctgaggcaggagaatcacttgaacctgggaggcggaggttgcagtgagctgagatcacgccactgcactccagtttgggcaacaagagcgaaactccgtctcaaaataaataaataaataaagcacaggaggacccataacccacaatcactgtgcctacagaaggatcccagatgtgttcacccttgctagccacagttgcctccaccatgattgcgaaagtcacagttgttgttgtcaccaccacctaagccactggcagaagtctgaaaaaatggtttctcccctctttctgcctcccaactttgttctaataaagcatgacaggaacgttgccaattggcaacggcgtccaggaaatgtagcatgcaggctttaagtgccagtatcagagtctagaatggtggtggccatagaaactctccagcatcatcttgtaaaaataatccaaacttggctgggcgcggtggcccacacctgtaattccagccctttggagggccgaggcaggcagttcacgaggtcaggaattcgagaccagcctggccaacacagtgaaaccccatctctactaaaaatacaagaattagccaggcgtggtggcgggtgcctgtaatcccagctactcgggaggctgaggcaggagaattgcttgaacctgggatggggaggttgcagtgagccaagatcgcaccattgcactccagcctgggcaacaagagcaaaactccgtctcagaagaaaaaaaagaaaaaaaaaaaggccgggcatggtggctcacgcctgaaatcccaacactttggaaggccgaggcaggcagatcatgaggtcaggagatcgagaccatcctggccaacatggtgaaaccccatctctactaaaaatacgaaaatttagccgggcatggtggggggtgcctgtagtcccagctacttgtgaggctgaggcaggagaatggcatgaactcaggaggcgggtcttgcagtgagccgagatcgcgccactgcactccagcctgggcaacacagaaacttcgtctcaaaaaaaaaaaaaaaaatccaaacttaatcatacacttttgaaccctaagaattatgttgagccttgaagaaaacgggactgtgtgatctgagccagacagcatgtaactacaacttctgcttatagattatagattaactctcctgttcttgctctgtagattcatttcaagactaaatggcatcagcgttaagatcgcccttcttcattgctgacctttcctctattatcttgcacctaaatcagaccagatagtgcaaaaggtcctgtgactgttatgtcctctatgtgaatgttaaatatacccttcccaaaaagaccactgccttgactaatcagattactgttaactatgtacttgccttgtgtgaaatatgtagaaacgctgtcaagcttcccaaaccttacctatataaatgacccccaaacttcctcagtttggaatgctgatttccattctttggaatctgtgttccagggtggccgtcctcaaacttttgtgctaaactaaactctatatttaaccatatttcctgaatttatttatttagggttgatgttttgatgatccagatgggatctgaagtggagttccagtgatccctgccacttctcacaatcagaccctttgtactgttaccgcaaaggggtcttgatccagaccccgagagggttcttggatctcacccaagaaagaattagtgcgagtccatacagtaaagtgaaagcaagtttattaggaaagtaaaggaataaaggaatggctacttcatagagcagccccaagggctgctggttgctttttttttttgggagaagtttcactgttgttgccagggctggagtgcaatgacgggatctcagctcaccacaacctccacctcctgggttcaagtggttctcctgcctcagcctcctgaatagctgggattagagacatgcaccaccacgcccagctaattttgtatttttagtagatgtggggtttctccatgttggttaggctggtcttgaactcccaacctcaagtgatccgcctgcctcggcctctcaaagtgctggaattacaggcttgagccactgtgcctggccaggttgctcatttttatggttatttcttgatgatatgctagacaaggggtggattattcatgccttccctttttacttatttatgtatttatttatttattttttgagacggagtctcgctctgtcacccaggctggagtgcagtggcgcgatctcggctcactgcaagctccgcctcccgggttcacgccattctcctgcctcagcctcccgagtagttgagactacaggcacccaccaccacgcccggctaatttttttgtatttttagtagagacagggtttcactgtgttagccaggatggtctcgatctcctgacctcgtgatccacccatctcagccttccaaagtgctgggattacaggcgtgagccaccgcgcccggcccccttttcaggctgccatatacagtaacttcctgatgttgccatgacctttgtaaactgccatggcgctggtgggagtgtagcagtgaggaccaccagaggtcactcccatcactatcttggttttggtgggttttagccggcttctttactgcaacctgttttatcagcaaggtctttagtgctgacctcctatctcatcatgtggctaagaatgccttaaccgcctgggaatgcagcccagtaggtctcagccttattttactaagcccctattcaagatggagttgctctggcagctacctgatttatgaattgttctttgctcagttacactccatgaaatttaatatgtccagagtttttcctctaacaaagtttaaagtgaagttaactagaatgaaataagattaaaaagtcatttcttggtcccactagccacatttcaagagctcaatagcaacacgtgacccggcatggtagctcacgcctgtgatcccagcactttgggaggctgaggcacgcagatcacttgaggtcaggagttccagaccagcctggccaacatggcgaaaccccatctctactaaaaatacaaaattcagatgggcatggcgcatgcctgtaatcccagctacttgggaggctaaggcatgagaatcgcttgaacccaggaggcagaggttgcagtgagccatacttgcgccactgaactccagcctgggcaacagagcaagattctgtctcaaaaacaaacaaacaaaaaaagcaacatgtgacaaattctctcggacaacgctgctcccaacgaatcttcagagcctgagccagtctcactcaccgttttttgtcttgttagctccactttattttatttttagagagggggtctcgctctgtcactcaggctggagtgcagtggcacgatcatagcccactgcagccttgacctcttggactcaagcgatcctcccatctcagcctcccaagtagctgggaccacagtcatgtacctccatgcccagctaattacaaaaaaaattttttttagagacaaggtctctatgttgcccaagctggtctcaaactcctggtcttaagtgaccctccctccttgaccccccagatagctgggattacaggcacaagccactacacctggcctgactcacctttgtacactaattggtaccagcactttctctccaggtctgcctctgattcttttcacactactcaccctgttcagaggtgaaagaggtaggcaatgtttgccacccttgcattaggaggaagggagtctttagtttctcagagtaataatcaatccctaataattggtgaaggttgatgtagccaccatcagaaaaaatccaggtgcaaaggtctgccaacattgaccagagtgagagcaaaattctgcagaacttcacttcccagccaggcttttgaaactgatcaactttcttttttttcttttcttctttctttctcttttttttttttttttttctgaggtagggtctcattctgtcacacaggctggagtgcagtggcacaatctcagctcactgcaatctccacctcccaagctcaggtgatcctcccatctcagcctcccgaatagctgggaccacgggtgtgcaccgccaaacccagctaatttttagtattttttgtagaggcagagtttcgccacattgcccaggctggtcttgaactcctggactcaagcaatttacacacctcagtctcccaaagtgctgggattacaggtgtgagctactgcacccggcccacactggtcaactctcaatattctgtatataaattccaatttatttggcttattcataacatcactagattccaaatttctggtgtcacaaatttgattattttcatcatgagtttcagtatgattatgggcctcttccagaagaagactgggccaggagcagtggctcacacctgtaagcccagagctttgagaggccaaggtgggaggatggcttgagtccaggagttcaggaccagcctgggcaacatgtgagactcccatccctataaaaattaaattaaaaaacaaaaaatatggctggctgcagtggttcatgcctataatcccagcactttgggagaccaaggcaggcggatcacgaggtcaagagatcaagaccatcctggctaacacagtgaaaccccatctctacttaaaatacaaaaagttaaccgggtgtggtggcgggcgcctgtagtcccagctactcaggaggttgaggctgcctccagcctcagcctgaagtacctgggactacaggtgcgcaccaccacatccagctcctttttgtatttttagtagagacgggttttcactgtgttggccaggctggtcttgaactctgggctcaagtgatccgcccacctcagcctcccaaagtgatgggattataggcgtgaggcacactgcctggtcaacttttattttataaaaagacttttgggagttaagaaaaggggatcatggttttggccagacccttgctggcctctggcttccagtgtgtaaaattgtcaagagggaacttctcagtgcaagggggtcaccaggggagatacaacctaccccacccagaagcatgaaacactgttcaaagaaaattggacaaagtgccatgtagacatttgagtttgaaacatagattaaagtagcaatgagattttaccagtcatccttatatccaatggggatcactaaagttcattccttctgtgaaattgattgaagtaatgttcgtgcctgttaatttttcccgacagcagctcttcctcctcttcctcgcgggccttcttcatttcctccttggcctgtatggcatccatctccctttctggaccctggagaaagaaagaaaaaacataagccccaccgggtgcgatggctcgtgcctgtaatcccagcactttgggaggccgaggcagatggatcacgaagtcaggagatcgagaccatcccggctaacacggtgaaacacagtctctaccaaaaatacaaaaaaaaaaaagccaggcgtggtggtgggcgcctgtagtcccagctactcgggaggctgaggcaggagaatggcctaaacctgggaggcagagcttgcagtgagctgagatcactctactgcactccatcctgggcgacagagcaagactctgtctcaaaaaaaaaaaaaaagcaaaaattagctgggcgtggtggtgtgtggctgtagtcccagctgctcgggaggctgaggtgagaggatcatttgaacctaggaggcggaggttgcagtgagtcgagatggcaccactgcactccagcctgggtgacagagcaaaacccgtctcaaaacaaaacaaaacaaaacaaaacaaaaaaagccccagaggccaggggttatgcttccatgtggccaaatgcatgtcagtactcaggcagaccctgccttctagaagcctcctcaccacctaggataggctgaataagaagaacctgtaaagattgcatgtcctggctgggcgcggtggctcacacctgtaatcccagcactttgggaggccgaggcaggcagatcatgaggtcaagagagcgagaccatcctggccaatatggtgaaaccccgtctctactaaaaatacaaaaattagttgggtgtggtggcaggtgcctgtagtcccagctactcgggaggctgaggcaggagaatcgcttgaaccgggaggtggaggttgcagtgcgccgagatcacgccactgtacttcagcctggcgacagagcgagactccgtctcaaaaaaaaaaaaaaaaaaaaaaaattcatgtcctaatccctggaacctgccaatattaaccttacatggggccaggcacagtggctcactcctgtaatcccagcactttgggaggccaaggcaggtggatcacctgaggtcaggacttcgagaccagcctgaacaatatggtgaaaccccctctctactaaaaatacacaaattagccggacgtggtggcatgcgcctgtagtcccagctacttgggagtctgaggcaggagaatcgcttgaacccgggaggtggaggttgcagtgagccgagactatgccactacattacagcctgggtgacagagctagactccatctaaaaaaaaaaaatttacacaaatgaaatagtgatgtaggaagagttaatcacgtgcttcataccttggtttcgccccaggtggccttgccaaaattatctgcgtactcttcatcatctgtgatcagaaagttatcaaaaatggttccagatctcacctgcagatgaaaataaggccttcattattatgcttttattctttattatttgtttatttttcatttcttttttcctttggaaatacatgaagctcaggtgacattttttattttttagagatggggtcttgctatgttgcctaggctggatttgaacttctgggcttggccaggcgtggtggttcacacctataatcccagcactttgggaggctggggcaggtgaatcacttgaggtcaggagttcaagactagcctggccaacacggtgaaccccatctctattaaaaatacaaaaattaccaggtgtggtcgtgcatgcctgtagtcccagctacttgggaggctgaggtgggaggatcgcttgaacccgggaagcagaagctgcagtgagttgagatcgtgccactgcactcccgcctgggtgacagagtgagactcagtctcaaagaaaaaaaaaaaagaactgggctcatgtgatggtcccacttcagcctccccagtagctgggactattacaggcgtgagccatactgtccctggctactaggccttcattattgatgtgacatatgtaacaacttttcaaaaagaaacagttgtattttgctcagtagtgtatactataacagcaattagaatagtaggtggtgcttaaacccatttctagaatatcctttccctctaaggcactggttccttaaacgtggctgcacatcgggatcaccaaaactttttttttttttgagacttagtctcgctctgttttttttttttttttttttgagatgaagtgaagtctcactctgttgcggaggctggagtgccgtggcgcgatcttggctcactgcaacctccacttcctgggttcaagtgattcctcccaggattaagttattctcatgcctcaccctcctgagtagctgggactacaagcacgcaccaccacacccagctaatttttgtatttttagtagagacgaagtttcactatgttgcccaggctgctctcaaacgcctgagctcaggcaatctgcccccctcagcctcccaaagtgctgggattacaggcatgagccactgagcccagctgggatcaccaaagcattaaaacaaaaaaacaaacaaaactctcagcactttggaaggctgaggtggaaggactgcttgagcctagaagttctgagactcccatctcttttttttttttttttttttgagacggagtcttgctctgtcacccagactggagtgcagtggcccgatctcagctcactgcaagctctgcctcccgggttcacgccattctcctgcctcagcgtcccgagtagctgggactacaggcgcccgccaccacgcccggctaattttttttgtatttttagtagagacggggtttcaccatgttagccaggatggtctcgatctcctgaccttgtgatccacccgcctcagcctcccaaagtgctgggattacaggagtgagccaccgcgcacagcctagactcccatttcttaaaaaaaaaaaatctggatgtggtggcttgtgcctgtagtcctagctacttgggaggctgaggtgggaggatcgcttgggcctagtttgaggctacagtgagctaggatggtgccactgcactccagcctaggtgacagaatgagaccctgtctcaacaaaacaaaacaaaacaaaacaaaacacacacacgcaaaaaatctaaagtaaagttaaaaccaaatgacctgccaaagctccaggccaatggcaccaatgttctcaaattctgagaggtcatactgcgtcaaatagtcggtattcttcatcttacggtggagccagacgtctttatgaataccttctggtttcaggccatcctgtatcaaaaaaaccatatggggtggtctcaatgacatgggcagcggaggggcagccctggggcatccctggcatcatacaaagaggccacacacctggtacgggggcttctggagcatcggcgctggccagtccccatccaggtcaccgttccagtcgctctgcttgctggtgctggcgtccagaaaatgcttctcccagtccttcaaagacatgtaaggaaaaagtaaaatcagtcagatgctcatatatttgttgttgttgcttctgtttttgtttcttgagactaggttttgctctcacccaggctggagtgcggttgtgcaatcatggctcactgcagcctcaacctcttgggctccagtgatcctcctgcctcagcctcccaagtagctcggactacaggcgcccgccatcatacctggctactatttttatgttttgtacagtcagggtctccctctgttgcccaggctggtctcgaactcctgggttcaagcgatcctcctgccttgacctctggaagtgctggtattacaggcattagccaccacacccagccagatgctcagatttgagaaaggaaattattagatgccaagtggcaggcacaggctggtgacccctgtcccagtgtccctctcccttcttcagtttggtggtcaggaggccaagtgcttggtgcttccaatcccactgaggacttcagggcaacaccacactgcctagatttttctccctaacctgccatatgactttagccctttcctgcatgctatggagaggagcagcggtgtggaaacctcaagtagtggctagagtgaaaaatgatggtgcaaaaagtgatggtgatggccagatgtggtggctcacacctgtaatcccagcactttgggaggccaaggcaggcaaatcacttgaggtcgggagttcgagactagcctggccaacatggtgaaaccccatctctactaaaaatacaaaaattagccagggatggtggcgggtgcctgtaatcccaggtattcgggaggctgaggcaggagaatcacttgaacctgggaggcggaggttgccgtgagctgagatcacgccactgcactccagcctgggcaagaagaacgaaactctgtctcaaaaaataaataaataagtaaataaataaatgttttacgataccttcagatgtgtagagatgtggctggtctgcagtgtgtgctctggggagggcatttggttctataatattgccatcgtggctaccagccatgcagcaattgtccagtaactgggtacttacaaactacatttgtgcactttttagagttgcccaggaaaaattcacacctgggctttgttgtctttagtctgttcccaatccttcgattctgccggggacgtttccttcttgagtgatgttaagttccagtcgtactctatgctgccggattcaattgactgaccatcaattttcacatcataagaaagatctggtcttaaaattagagtgtacaggtgtgtgaagccatcaacctgcatattttagggggaaaagcgtaacaattaaatcctcaatttcttttttcttttcttttctttttttttttttttttgagatggagtctcactctgtcgcccaggttggagcgctgtggcacaatctcggctcactacaacctccacctcctgagttcaagcgattctactgcctcagcctcctgagaagctgggattacaggcacctgccaccatgcctgggtaattttttgtgtctagtagagacagagtttcaccatgttgaccaggctggtctcgaactcctgacctcaggtgatccacctgcctcagcctcccaaagtgctgggattacaggcatgagccaccacgcccggccaactctcgatgttttaatgcaagtctaaatatgcagtttatttttatttttatttttttgagacagggtcttgctctgtcacccaggctggagtgcagtggtgcaatcagagctcactacaaccttgacctcccaggctcaagtgaccctcccacctcagcctccccagtagctgggaccacaggttcctggcactacacctggctaatttttgtattttttgtcatgacaagatttcgccatgttgcccaggctggtcttgaactccttggctcaagcagtcctcctgcctcagcttcccaaactgctgggattacaggtgtgagccactgcacccagacatttctccagaatgtttttttcatcctgaatatttcattcattaatgaggatggatgtggctgaaatgtgactgtactattgtaaccctcatagggcaaatgatgacatgtcatagctcacagtaaaaaatgagagtgccctcctgatggggtaaaaacttcaggaaaccagttaaaggagagaagtatctccaatgggccccctaaactggaaactggaaacaggaggtatgtctacaaagacccatccctggctcagttaagtattttattatcaaaactattttttctaaacttagtctggcaggagttaacactcatttatttgaatacaagagcagttaccttacacctgatcagtttcttgttttcgtgatacttattcttgaaatgtaaaataacatgaactttcttgatatcaaatccacaaatatcgggtcctacaaaaaagattagctgctctcaatttctttccataatgcatcaccgtagaataaccaacccacaaccattctttttttttttttgagacggagtcttgctgtcacccaggctggagtgcagtgatcttggctcacggaaacttctgcctcttgggttcaagcaattctcctgcctcagcctcctgagtagctgggactacaggcgcatgccacgatgcccagctaatttttgtatttttagtagagatggggtttcaccatgctggccaggctggtctcaaactcctgaccttgtgatccacctgcctcggcctcccaaagtcctaggattacaggcttgaaacaccacgtgcagtccattcttcttacatataatcagatattcacactaagatatttatttatttatttgagacagagtctcactctgtcgcccaggctggagtgcagtggtgggatcttggctcactgcagtctccgcctcccgggtttaagtgattctcctgcatcaacctcccgagtagaatagctgtgattacaggcatgtaccaccaggcccagctaatttttgtgtttttagtagagacaggttttgccatgttggctaggctggtctcaaactcctgacctcaagtgatttgcctgccttggcctcccaaagtgctgagattataggtgtgagccactgcatctggtcacatgtgtgaatatcttattattgttgttaaaggacaatgtcctggctttccactcacttttgagtgtgttctgaagcttatttaaatattcaaagtggcctgctaatcccagcactttaggaggccaaggtggggagatgacttgaggccagtttgagaccagcctggccaacatggtaaaaccccgtgtgtactaaaaatacaaaaattagctgggagtggtggcgtgtccctgtagtcccagggacctgtgaggctgaggtgaggggatcacttgaacccaggaagtggaggttgcagtgagctgagatcgggccactgtactccagcctgggtgaccaagcgagactccgtctcaattaaaaaaaaaaaaaaagtgtgggctgggcatggtggctcacggctgtaatcccagaactttggggggctgaggcgggtgaatcacgaggtcaggagttcgagaccagcctgactaacatggtgaaaccccacctctactaaaaatacaaaaattagccagccatggtggcacacgcctgtaatcccagctattggggaggctgaggcaggagaatggcttgaacctgggaggcggaggttgcaatgagccgagattgcaccattgcactccagcctgggtgacagagcaagattctatctcaaaaaaaaaaaaaaaaaaaggtatttacacatgtaatggatgttcatgaggaaatgtagacagatgggctctgtgttgcctgtctgaggttttatgcataacttatgcataggaattcatgcaaatgtcaagactgacaataactgtgcttcccttgtcctcctccttaacccctcaccctcagcaagctcccctcacactaatggctggcgctgactcattgcaacaaagtgtcccaatagtaacagagtgggtttgagtaaaatggaactgttgaattaaaaactgaaatactaagaaaaatttattttaatctttttttgaccccaaattatgctgcttggcaattcagatgtagtagacacatgctatataggggtctttatttatttatttatttatttcggacagggtcttattctgtcatccaggctggagtgcagttgtgtgatcatagcttactgcatcctcaaactcctcggctcgggggattcccctgcttcagcctcctgagtagctagaaccacaggggtgcgccacctcactgggttaatttttaaaattgttgtagagatggggccaggcgtggtggctcacgcctgtaattccagcactttgggaggccaaagtgggtggatcacctgaggtcagtaggtcgagaccagcctgtccaacatggtgaaaccccgtctctacaaaaatacaaaaaaattagctgggcatggtggtgggcacctgtaaccccagctacttgggaggctgaggtaggagaatcgcttgaacctgggaggcagaggttgcagtgagccgggatcgtgccgttgcactccagcctgggcgacgagcgaagctgtgtctccacaaaaaaaaaaaaaaaaacattttgtagagatggggtcttgctatattgcccaagctggtctcaaactccggggctcaagtgatcctcccttgatgtttcagatatctgggtgttttttagttctatttttatttttattttgtattttgtatcatttatttatttatttatttgagacggatttttgctctcattgcccaggctggagtgcaatggtgcaatctcggctaaccataacctctgcctcccaggttcaggtgattctcctgcctcagcctcctgagtagctgggattattacaggcatgcgccaccacgcccagctaattttcaatttttttttttttttttgagacggagtctcactctgttgcccaggctggagtgcagtggcgtgatctcagctcactgcaagctccgcctcccaggttcaggccattctcctgcctcagcctcccgagtagatgggactacaggtgcccaccaccacacctggctaattttttgtatttttagtagagacggggtttcactgtgttagccaagatggtctcaatctcctgacctcgtgatctgcccacctcggcctcccaaagtgctgggattacaggtgtgagccaccgcgcccggctctaattttgtatttttaatagaaacggggtttctccatgttggtcaagctggtctcgaactcccgacctaaggtgatgcgcccgcctctggctcccagagtgctgggataacaggcgtgagccaccgcacagagccctaatttttattttttgtagtgacagggtctcactatgttggccaagctggtctcgaactcctggactcaagtaatcctcctgcctggcctcccaaaagtgctgggattacaggcataagccactgtgcccagctgaggatgaatattttggaagtacattcattctttttttggagatggagtctcgttctgttacccaggctggagtgcagtggtgagatctcggctcactgcaacctccacctcccaggttcaagcaattctcctgcctcagcctcctgagtacctgggactacaggcatgtgccactatgcccggctaattttttttgtatttttagtagagatagggttttaccatgttagccaggctggtcttgaactcctgaactccagtgatctgcccaccttggcctcccaaaatgctgagattacaggtgtgagccgcgacacccggcctgaggtacatttattattaaagttttaagttacactatacttaggtctatttcctgtggcccagtgtggtcccttcccagttctagcacaaattttaatcaagtacccctgttgtcaggagacatttaatattttctagaggtttgcaggctttttctataaaggccagatggtaaaatatttttggctttgtaagcctaatgatctctgtcatgacaacttaactctgccactggtactggcgagcagccacagacaacatataaatgaacagagtgaggctgcattccagtaagacttcatttatgcacactgaaatctaaatttcatataattttcatgtatcacaaaatatcatcttgtattgattttttccaaccagttaaaaacgtaaaaaacatttttagttcacaggttatataaacacaggcagtgggccaatttggcccacggccaaggtttactgagtactgaaggattcaaaacacaggttgaggccaggcgtggtggctcacgcctgtaatcccagcactttggaaggccaaggtgggtggatcacctgaggtcaggagttcgatacctgccaggagttcgagaccagcctgaccaccatggtgaaaccccatcttggccgggtgcagtggctcacgcctgtaatcccagcactttgggaggctgaggtgggcggatcacctgagatcgggagttcaagaccagcctgaccaacatggagaaaccccgtctctactaaaaatacaaaaattagctgggcatggtggtgcatgccggtaatcccagctacttgggaggctgaagcaggtgaatcccttgaacctgggaggaggaggttgcagtgagccgagatcatgccattccactccagcctgggcaacaagagcgaaactctgtctcaaaaaaaaaaaaaacccatctctactaaaatacaaaaaaattagccaggtatggtggcacatgcctgtaatcccagctactcaagaggctgagataggagaatcacttgaacccaggaggcggagattgcagtgaggcgagatcaagccattgccattgcactccagcctggttcacaagagtgaaaactcgggctcgaaacaaaaacaaaaacaaaaacaaaaacaaaaacaaaaacaaacaaacaaaaaaactacacaggttgagcatcccaaatcaaaaaatcgcaaatctgaagtgttccaaaacccaaaacttttagaatcaacatgatgctcaaaggaaatgctcatcagagcattgtggatttcagatttttcagattagcgttgttcaaccagtaaggataatgcaaataatccaaaatccaaaaaaaatttccaaaatccaaaacactctggtcccaaacatttcagataaggtatccttaccctgcatgagggcaacattaatggtgaataaataacttcttcaggaacacaacagactggtacagttgcctttttatattaattaggcttaatagtgcttggatccgatacactcaatactactacaaaccttggatccgatatactcaatactactaccttcactacattagcaaagtcttagtctaaagatcctgtgaagtgggagggttttcaaagtcactagaagtggttgtgttgcaccacgtaaactcaccaaacataatatagtactgcgattttccattcaggttcttctggtcaatgtctgcaggaaagaccttaatgtagccccctccacagtccatcttctgctcatgttttactgtgtactgaataaccagagttttccctttattgctgaacggtttgaagcgtgcagagatggcatagaatcggccattctgagtggtttgcagacctttgaacaaaatatactcatgaaggatcaggaatgacgctgcgctaagtaacgcaggaagttaaatcgatgtccttcccttactcccaaacataaatgtcctaaccatttacagtgatctacagtgccaacagagcattatacaataatgcataatgggtagaccactagcaggcactctgcttctatataattttttttttttgacatggagtctcactctgtcgcccaggctggagtgcaatggcgtgatctcggctcactgcaacctccacctcccgggttcaagtgattctcctgcctcagcctcctgagtagttgggattacaactacaattagccaccacgccaggctaatttttgtatttctagtagagatagggtttctccatgttggtcaggctggtcttgaactcctgacctcaggtgactgcccgtctcagcctcccaaagtgctggaattacaggtgtgagccagcgtgcctggcccatacaacttttatttcacacacctggaagtttttgttcttaatataccactgttcttaattagttaattaattattttttgagatggagtctcgctctgtcgcccaggctggagtgcagtggcacgatctctgcccactgcaagctccacctcctgggttcacgccattctcctgcctcagcctcccgagtagctgggactacaggcgctggccacaacacccagctaattttttgtatttttagtagagacagggtttcaccatgttagccaggatgttctcgatcccctgacctcatgatccgcctgcctcggcctcccaaagtgctgggattacaggcgtgagccaccgtgcccgactggtccctttcctaaacattctactctgccttttcagcataaaaggcagccatagacaatatataaatgaatggactgccaggcatgctggctcacgcctgtaatcccagcactttgggaggctgaggcaggcggatcacggggtcaggagtttgagaccagcctggccaacatggtgaaaccctatctctactaaaaatacaaaaattagcggggtgtggtggcatgtgcctgtagtcccagctactcaggagagtgaggcagaagaatcgcttaaacccaggaggcggaggttgcagtgagccgagattgcaccgctgcactccagcctgggtgacagagtgagactccgtctccaaaaaaaaaagaatggatgtggctgtgttccagtgaaacttaatggacactaaactttctttctttcttttcttttttcttttgagacagaggctcgctctattgcccagactgaatctctgctcactgcaacctccgcctcccaggttcaagcgattctcctgcctcagcctcctgagtagctgcgactacaggcgtgcgacaccatgcctggctaattttcatatttttagtagagatggggtttcaccacgttgcccaggctggtcttgaactcctggcctcaagtgatccactcaccttggcctcccagagtgctaagattacaggtgtgaaccactgtgcctggcctaaactttcacatatgtgaaagcaaatacaatttaaagccttgagaggccaggcatggtggctcacatctgtaatctcaacactttgggaggctgagccgggtggatcacttgaagtcagaagttcgagaccagcctggccaacgtggggaaactccatttctactaaaaatacaaaattagccgagcgtagtggcgcgtgcctgtggtcccagctactcgggaagctcaggcagctgaactgtttgaacctgggagatggaggagccattgcaccccagcctgggtggcagggcgaaactccgtttaaaaaaataaataagccagacgcagtggctcacgcctgtaattccaacactttgggaggccgaggcgggcggatcacctgaggttgggagttggagaccagcctgaccaacatggagaaaccctgtctctactaaaaatacaaaattaggccgggcgcggtggctcatgcctgtaatcccagcactttgggaggccgaggcgggaggatcacgaggtcaggagatcgagatcatcctggctaacacgtgaaaccctgtctctactaaaaaaaaaaaaatacaaaaaattagccgggcgtggtggcaggcgcctgtagttccggctactcggcagaagaatggcgtgaacccaggaggcagagcttgcagtgagccgagatcgcgccactgcactccatcctgggctacagagcgagactccgtctcaaaaaaaaaaaaaaaaaaattagccaggtgtggtggcacatgcctgtaatcttagctacttgggaggctggaagcaggagaatcatttgaacctgggaggcggaggttgtggtgagcagagatcacgccattgcactccagcctgggtaacaagggtgaaactctctctcaaataaatacataaaataaataaaaaccttgagcaagttgtgtgatctgagtcatgcagcatgcaggtgtaacctctgcttcttaaatcatagataaaccttcttcctcattgttcttgtttggcaaatgactaggacaaaccagagaccaggcctcctctatttgtgaccactgaccttagttacagattaactgcctccaggactgacctgtacctaactcagaccagatggcacaaaagatgccgtgactgttacatcttcagggtgaaatgttaaatataccttctcaaaagaaaaagaccaccttgactaatgggatcatggtcattatctatcaagccttgcctagaaagatgctgaaattctgttaagcttctctaaactttgtctatacaaatgatcccaaacttctacacttcagaacactgacttctattctttgggatctgtgttttccacacagttgtccttaaactttgagcttgaattagctctcttgaagctagaatttttttttttttttttttttttttgagacagagtcttgctctgttgcccaggctggagtgtagtggcacgatctcgactcactgcaacctccgcctctcgggttcatgtgattctcctgcctcaatctctcaagtagctgggactacaggcctatgccaccatgctcggctaatatttgtatatatatatattttttttcttgagacagagtcttgctcggttatccaggctggagtgcagtggcatgatcttggctccctgcaacctccgcctcctgggttcaagtgattctcctgcctcagcctctgaagtaggtgagattatagatgtgtgccaccatgcccagctaatttttgtatttttaatagagacggagtttcgccatgttggccgggctggtctcaacctcaagtgattcgcttgccttatcttgacctgcctgtacaaaagtaaaagctcattgtgttgtaccctgaagaatgtgcaggcgacaagatgtaatgtttatctctgtatttttttcttttattttttgaaatggagtctcattctgtcacccaggctggagtgcagtggtacaatctcagttcactgcaacctctgcctcctgggtacaaacgattcttctgcctcagcctcccaattagctgggattatagttgtgcgccaccacacttggctaacttttttgtatttttgtggagacagggtttcaccatggtgaccaggctggtctcaaactcctgacttcaagtaatccgcctgccttggcctcccaacatgctgggattacaggcgtgagccaccgtgcctgaccatatttttctttttttttgagatggagtctcactctgtcactgaggctggagtgcaggggcatgatctctgctcactgcaacctctgcctcccgggttcaagtgattcttctgcctcagcctcccgagtagctgggactacaggcatgagccaccacacccagctaatttttgtatttttagtagagacagggtgtcaccgtattggccagactggttttgaactcctgacctcatgatccgctcgcctaaggcctcccaaagtgctgggattacaggcatgagccaccgcgcctggcctatttttctttttaatacgaaaattaaaatgagaaaaagtacccactaaccttttccttctgaggggcatggcccttgatcctcaaatgcacttgactagtgtctattaagaggggcaattttggtaatgcctactaataacacattcatataaatataatccaaagaaggttaaataccattgcatatttgacagtgcttcaagtatgattttattataccaaataagctgaatatgtctccttggacttcaggggacctaataccaataaaagtaataataatgataataggccaagcaccatggctcacgcctataatcccagcactttaggaggccgaggcaggtggattacttaaggccaggagtttgagtccagcctgggcaatgtggtgaaactctgtctctaaaaaaattagcagggcatggtggcgcacgcttgtaatcgcagctcctcagaagcctgaagcaagagaatcacttgaacccgggagacggaggtttgagtgagccaagatcgtgccactgcactctagcctaggcgacagagcgagactcctactaccaaaaaaaaaaaaaaaaaaaaaaaggaatctttggcaataaagaaaggagagaggaggctggatgttgtggctcatgcctgtaatcccagcactttgggaggccaaggtgggtggatcatgaggtcaggagttcgagaccagcctggccaacgtggaccctgtctctactaaaagtacaaaaattagccggtcatggtggcgcgcgcctgtagtctcagctactcgggaggctgaggcaggagaattgcttgaacccgggaggtggaagttgcagtgagccgaaatcgcgccactgcactccagcctgggcaacagagcaaggctccgtctcaaaaaaaaaaaaaaaaaaaaaggagagaagaaacaaaaaaacaaggaaaggagccccttaagttctacctttgccttaatgtcttcatctgtaaaacgggaataaaagcgttttggctgtgccacaactacctagagaggttgctatggaaatgtaacattaggctcaatttggtcctgattctacactaacctttatctttctctttatgaccataaaacttgcccgacgaaagtctaaaatgcccaaatcgggagtcattggtggactgcaaccatcggtttctccaatgctctgtggggaaggggaaataacaccggttagaggtgataatggttaatttgggctaagggaagggtgaaggggaccctcgaggattcgagggttcgctgccgtggaccccgtggcgactctggccagccttagggggcggagatgggggagcttacacctccgccaccacgggcgtggccccttcacctccgtctagaaattcctcttggaaatagacggtagccagcgccactcgcagcatgcatatggcccagagctggaccaaagcccgggccatgggggtgtgcactgcgcttccggtcgccgccaccccttagctcccagctctctctgcggctcttcaggcgcgtcccgaaactacaactcccgtcacaactcgcgattatgacctgagggtcccattggtcgctgcggcgcggggcacgttgggcccgccccggaactaccgctcccatgacaccccgcgattgtgattcggggcgccattggtctgcggggcgcggtgcttcccgggagatgtagtctcttctgctctggctctgttgcccagggcaaccgctccttcaggcgtgaatgtggcggctgcctctgcgaatggacggcgtgggaagaggtcggcagggctggtggggaggtgacctagctgggcgtccgggctcgcgagggggatacggggaaatggggccttctccggggctgagctggttgggccgctgcaggatggtcccgcgcctcagtttccctgtctggggtctattggagcatggtcctgcgcgggtcgcttcatagctggggagaagagcaggatggtctcaggggcgccagggttttcaagttttggtttgttgatttgtaacaactttattgagccttcatttacataccatagtgttcgccacttttaagctgacgactccgttatttttagtaaatctacaaagttgtgaagccgtcgccaccatccagctcatccagctttagaactttgcgtcaggccgggcgcggtgattcacgcctggaatcccagcactttgggaggcagaggcgggaggatcacttgaggccaggagatccagaccagcctgggcaacctggcgagaccccatctctaaaaaagataaaaataaaaaattagccaggtgtagtggcacgcgcctgtagtcccagctactcaggatgttgaggcaggagggaggattgcttgtgtccaggaggtcaagggctgctgtgagctgtgatcatgccactgcactccggctaattttttgtatttttagtagagatggggtttcaccatgtttgccacgctggtctcgaactcctgacctcacgtaatctgccagccttggcctcccaaagtgctgggattataggcgtgagtcacagcaccggcccgatctgctttctgagtttattggtttgccttttcttgacagttcttacaaatgaaatgatagggtgtgtggagtttagtgtctggctactttcttttttctttccttttttttttttttttgagacagattctcgctctgttacttaggctgaagtgcaatggtgcgatctcggctcactgcgaactccgcctcccaggttcaagcaattctcctgtctcagcgtcctgagtatttgggattacaggcgcatgacaccacgccccgctaatttttgtattgttagtagagacggggttttaccatgtgtgtcaggctggtctcgatctcctgacctcgtgatccgcccgccttagcctcccaaagtgctgggattacaggcgtgagccactgcgcccggcttggctactttcccttagcgtgatgtatttgagattcctgcgtgctgttatattagtatttgttttttaaattgctgaactgtattacactgtatggatggaccatagtttgtaatccattcactaattaatggatagttacattgttttccgttttagtctactaggagtaataaatattatggggccaggtatgatgatgtgggattgtaatctcagcattttgggaggctgaggctgcggatctctagaaccccaggaatctgagaacagcctgggcaacacagtgagaccttgtttctacaaaaagttagctaggcatggcaatgtgtgtctgtagtcccagctacccaggaagctgaggtgggaggatcgcgtgaccccgggaggtcgaggctgtagtgagccatgataacaccactgcactcagcctgggcaacagagtgagagcctgtctcaaaacaaaacaaaactattacgaacatttgcatacatttgcatttctcttgggccacatgggagtggaatccctggatcacatggtaactctatgtctaaccttttgaggaaccaactgttttccacattgaggactacataattttacaattcccccaacaacatatgagggttccaatttctttattttttttagagatagggtcttgccctatcatccgggctggagtccagtggcacgatcatagctcactgcagcctcaaactcctgggctcaagcaatcctcccacctcagcctcccgagtaactgggactacaggtgtgtgccatcagacccagctaattttttcattttttgtagagatggagtctccctatgttgcccaggctggtctcgaactcatgggttcaaacagtcctcccatcctggcctcccacagtgctgggattacaggtgtgagccactgtgggcttcaatctgttcacttcctcactgacacttgttacgtgtatttttgattatagccatgctaggggatgtgaagtagtagctcctcatggtttttttcttttttttttttgagacggagtctctctcttttgcccaggctggagtgcaatggcgcgatctcggttcactgcaagctctgcctcctgggttcatgccattctcctgcctcggcctcctgagtagctgggactacaggcgcccaccaccgcgcccggctaattttttgtgtttttagtagagacggggtttcactgtgttagccaggatggtctctatctcctgacctcatgatccgcccacctcggcctcccaaagtgctgggattacaggcgtgagccaccacgcctagtctgttactggcatttaaatgttactgagcactttttcatgtcccacacagaatatataggaatcctatgagggtagtaattgttatttttacagatgagcaggctgacacagagcgattaagtaacttgcccggggtcacacagaccaggaagtctgcattatttctgccaggcatatttttctgttctctgacccctgtggtcagtcctgtgctgggcactcctagtacagggtagttaagataggaacaagcaaacaagtttattcgggaaacagattgttaataggaatcataattcattcttgtatagaatcttttttttttctttttttttgagacggagttttactctgtcacccaggctggagtgcagtggcgcagtctcggctcactgcaagctccgcctcccgggttcatgccattctcctgcctcagcctccggagtagctgggactacaggcgcccgccaccacgcccggctaatttttttgtatttttagtagagacggggtttcaccgtggtctcgatctcctgacctcgtgatccacccgccttggcctcccaaagtgctgggattacgggcatgagccaccgcacccggcctgtagtttttcatcttttaaagtctttgtaatcttcggaagcctttgtaagtcttgcagtgggttgttcatactctttcaggggtatatgggaactctgagaatatgatgaaagctctgatatttctacctagaaaaatatacacatacggtaaagatttgctggcctgctggggagctgtgcctgtccatagcccccctctttcccagggtagcggttcttcttttttttttgagacagagtctcgctctgtcgtccaggctggagtgcagtggtgtgatctcggctcactgcaacctccacctcccgggttcaagcgattctcctgcctcagcttcctaagtagctgggactacaggtggtgccaccaggcccggctaatttttgtatttttagtagagacggggtttcaccatgttgatcagactggtcttgaacttatgacctcgtgatccacccaccacggcctaccaaagtgctgggattataggcatgagccaccacgcctggcgcttgactaatttttgtatttttagtagagatggggctttgccatgttggccaggctggtctcgaacccctgggctcaggtgatctgcttgccttggcctcctaaactgctggcattataggtgtgagccactgagcccagccattggtaatggttcttacactaagtgaaatctgattttctgggggcttgttaaatacagggatacctcgattttcacacgtcaccttattgctctttcaggtaatttgtcttttcttttttctttttctttttttttttttttagacagggtttcactctgtagcccaggctagagtgcagtggcaggcatggtggtgtgcacctgtagtcccagctacacaggaggctgaggcaggaggatcacttgagcctgagaggttgtgcaccaccacgtccagctaatttttgtatttttagtagagacggggtttcaccatgtttgccaggatggtctcaatctcttgacatcgtgatccacctgcctcggcctcccaaagtgctgggattacaggtgtgagccactgcacccagcctggtcattttcattgtcatccttgggcttgaagggaagactgtggctgggttgcaaaagacagtgtgagcttttgccaagtaggagccattgaatgctcaatacaaacagcaggtactcttatgcaaaattgctcctcttcctccacagaatggcttctgcaaggaaagccagccgtcccatgcgtgatgtttttggtgacttcagtgatgtttccttggaagattcaacaatggaagaaatcagaaacttccagatcagtagaaatcttaccaaaatagcacctggtcatagcagatttctaaaaagaaaccaaactctagatgagaaacacttactcctgaaagagaaccctgtgctcgggagtggacccaggcttgcctcatgtagaccgcccaccactgcctccaggatccgagccaatgccgcactcatgaagctggcccagctggaaacccggatcatgaatcggaagctgcagaggaatttgtctgacacggaatctgactcaatgaccgccgatgctggtcttccaaagagagctgacagaatcctctctgggggtgcactcgaactcgcgtcccagaacacagacaaaacttcccagaatcaagcccgtgaacttcctgtcaccgaaaataatgcacagaacgcgaaggtcagtaggtttctaaagaagaaacaagcacctgttgaaaacatatcccctgaagcacctgctgggaaagagaggactttgcaaacccccaaacagaaagaacctgctagaacatttgattctccagacagtgacgaagaagaaatgaaagtattgctaggaagcttgatggactcttctagagaaaaaaacacgaatcaaggcttcagcagcgctaacgtcagcgaggaagaagaaagaaaactattttcggtgagattttttttttttggtaaatttattttaatttatttaatttaattttttttttgagatggagttttgctcttgttgcccaggctggagtgcaatggcacgatctctgctcaccgcaacctccactcctagattcaagtgattctcctgcctcagcctcccgagtagctggaattacaggcatgcaccaccacgcccagctaattttatgtgtttagtagagatggggtttctccatgttggtcaggctggtgttgaacttccgatctcaggtgatctgcccgcctcagcctcccaaagtgctgggattacaggcatgagccaccatgcccggccggtgactggctacttttttgtattttttttttttttgagaccaagtttcgttcttgttgcccaggctagagtgcagtggcgtgatctcagctcaccgcaacctccacctcccaggttcaagtgattctcctgcctcagccttcctgagtatctgggattacaagcatgcaccaccatgcccggctgattttgtatttttagtagagacagggtttctccatgttgatcaggctggtctccaactcctgacctcaggtgatttgcctacctcagcctcccaaagtgctgggattacaggtgtgagccagtgtgcgtggcctatttgtggaatattttctttctttccttttttttttttttttttttgagatggagtctcattctgtcaccaggctggagtgcagtggcctgatctcggctcactgcaacttctgcctcctgggttcaagcaattcttttgcctcagcctcccgagtagctgggattacaggagcataccaccacgcccagctaatttttgtatttttagtagagatggggtttcatcctgttggccgtgatggtctcgatcgcttgacctcatgatctgcccgcctcggcctcccaaagtgccgggatttacaggcgtgagccaccacgcccagccttgtggaattattttctactcccaacattatcttacctaaatattgtactgtgactttcagaaatgaagagagaaaggggatgcagtaagagaaaaatgtgatacctgtggtcttggtctcatgctccccgctaattgcactgtctgtttaaccataagaacttttaggtatcagccaggtatggtggctcacacctgtaatcccagggttttggaaagcttaggtgggtagattgcttcagctgtggtcaaggccagtctgggcaacatggcaaaacccattcctacaaaaaaaaaaaaaaaattagccaggtgtggtggcacatacttgtagtcctagctgcttgggaggctgaggtgagaggattgcttgagcccaggatgtcgaggctacagtgagctattgagccactgccctccagcctaggcaacagagtgagaccctttctcaaaaaaaaaaaacaaaaaacaaaaaaacaaaaaaccttagttgtcataagtttgttaatttcaagtgttttatatcaggtcccatctcaactgagagcatttactgtacccagcgtggaactctccagcgcaaagccttctcagacatcacacctgccaacctccctggcagcagacagaacccttcacagcactcgctcaagagcagactacccacagagtcacgtttccagtgacaccgcctcccacacgccgtcagtttccatcacaggcgccttttcaaactcagtgtctttaaagatggggcatgtcaagcttgtgtcctccccgggaaggagtgaggctgagactgtggacgagccagtctcagaaggtgctgatgacagcctcgacggtaatcccagtcccggtgcaaagccagtaccttgggcaggaagggtggggccacctttagagtccctgacgcagtggtcatggggcattgccacaggcagggagttttgagtcgcatctcacactcagctttctaactttcttgtctggttgaggggccaagtccgatttttgtgctatctttatttatttatttaattctgagacagggtcttgctctgtcgctcaggctggagtgtagtgggcatgatcagggttcactacagcctcaacctcccaggctcaagcaatccgcctgcctcagcctcctgaccagctgggaccacaagcgtgtgccaccacaccgggctaatttttgtactctttgtggagaccaggtttcaccatgttgtccaggctgatcttgagttcctggccttaggtgatctgcctgccttggcctcccaaagtgctgggattacaagtgtgagccactacacctggcttaccaactcatctcttgagtcaatttaaacctgttggaagctgttggaggctaggcctggtggctcacgcctgcaatcccagtgctttggaaagcctaggcaggaggagtttgagaccagcctggcaacatggtgaaaccctgtttttacaaaaaatacaaaaattaactgggtgtggttgtgcgcacctgtagtcccagctgctggggaggctgaggcaggaggatcgtttgagcctgagaattggagcctgcctgggaattggaggctgcggtgagctatgaacacaccactgcactccagcctgggtgacagagcaagactccatctctaaaaaaaaatttttttaaacccaaaaacctgttggggcaccagaatctccacagagaaccccacactcctgggtcccggcacacacttggttcaggcactggcctccaccctaaggttctgtggtgcctttgacttgctgtactatttttttgttttttagaactctttttttcagaactcacagtctattaacttgctgtaaatgacaacataggatgctttggggccatgtctcaggtctgcccctgctccacagtcttcccactctttccccccagctggctggctgccctgccacctcccaccccttacaccacacacgtacttctcagcaacttccaacagtacactctgatcagctgctaatctgtctagaccaggggctagcaggcctgtcttctgtctgtttttttttttgtttgtttgtttttttgagatgttgcccaggctggggtgcagtggcgtgatctcagctcactgtaatctctgcctcccaggttcaagtgatgctcctgtctcagcttcccaagtagctgggactataggcgcacgccaccatgcctggctaattttttgtatttttagtggagacgggacggggtttcaccatgttggtgaggctggtctttttttttttttgagatgacatctcgctctgtcacccaggctggagtgcaatggcgtgatctcggctcactgtaacctccgcctcctgggttcaagcgattctcctgcctcagcctcccaagtagctgggactacaggtgcccaccaccacgcccagctaatttttatacttttaatagagacagggtttcaccatgttggccaggatggtctcgatctcttgaccttgtgatccgcctgcctccgcctcccaaagtgctaggattacaggcgtgagccaccgtacctggtggtcaggctggtcttgaactcctgaccttgtgatctgttctcctcagcctcccaaagtgctgggattacaggcatgagccactgtgcccggccctgtcttctgtctgttttttttttgacagagttttgcccttgttgcccaggctggagtgcaatggcgtgatcttggctcactgcaacttccgcctccgagattcaagcaattcttctgcctcagcctctcgagtagctgggattacaggctcttgccaccacgcccagctaatttttctatttttagtagagacgggatttcaacatgttggccaggctggtcttcgactcctgacctgaggtgatccacctgcctcggcctcccaaagtgctgggattacaggcatgagccactgcaccaagcctgtcttctgtctttataaagctttctcagaaggcagccacgctccttcctttacacattgtctatggctgctttcacactatgacattggagctgagtcagtctgtccccaaaagctggaaatttcccagctagccttttattttttatcattattattatcattatttgttatgataattatttttgagacggagccttgctctgtcacccgggctggagtgcagtggcatgatcttggctcactgcaacctccaactccgggttcaagcgattttcctgcctcagcctcctgagtggctgggactacaggcacgtgccatcacacttggctaatttttgtatttttaatagagatcgggtttcaccatgttgaccaggctggtgttgaactcctggcctcagttgatctgcccatctcggcctcccaaagtgctgggattacaggcgtgagccaccatgcccgatgattattattattttttagagacagggtctctctatgctccaggctggagtgcagtggtgtgatcatagttcactgcagctttgaactggtctcaagagattctccggcctcagcctcctgagtagctgggactacaggcacccgccaccacgcctggctaattttttgtatttttagtagagacagggtttcattgtgttagccaggatggtctcgatctcctgaccttgtgatctgcccgcctcggcctcccaaagtgttgggattacaggcgtgagtcaccgcgcctggccatgtcttcatatctttctaaacatttgtgggagattaggctggctgcggtggctcacacctgtaaacccagcactttgggaggccgaggcaggtgaatcacttgaggccaggaattcaagaccagcctggccaaatggtgaaatcttgtctgtactaaaaatagaaaaattagccgggcgaggtgtcaggcacctgtaatcccagctactcaggaggctgaggtgagagaatcacttgaacttgggaggcagaagttgtggtgagccaagatcgtgccactgcactccagcctgggtgacagagtgagactctatctcaaaaaaaaaaagaaaagaaaagaaaaaagaaatttggaaggtttgtaaaaatttatggagtaaataagagagtaaatgtaaacgcttatactcattttttaattacagagtttagaataaatattttatcgcttgacggtctggctccagctgtcagtgagaactccgatttggaacaggaagtaagtacaacaaagtcatttttcatggtcgattgtttttggcttcaacatttttttttttaaatttttaaaaaatttaaaaattgaggcagggtctcactatgttgcccaggccgtcctcaaactgggctcaagcaatcctcccgattcagcctcccaaagtgctgggattacaggtgtgagcgaccatgcctggcccaatgtcgattcttatgtggaaaagcaagtaatgtttcatttaggcctatagttttcaaatctgccccccaggggacattggcaatgtctggtgacattttggctgtcatgactagggggtgggtgacagatgccactggcattgtgagtgggtggaggccaggaacactgctccatattgtgtaatgcaccgggtggcccccagctgccaagaatgttgtggcctctgatgtcaagagtgcagtaggtgagagaccctgatttaggtgctaacaggatgaagctaccttggttagctggtgattaaagcacatcccacgtaaagccgcccatgacaacatctgcacggaggcaacacttcaccagccgtatccagtcacactccctgttgtgatttttgtcctggtggccaccggcactgtcagatacacgtgttggttatacacagtgatgacattttatttttattttaaaatatttattgtttttattttattattattattattttttattttaaactttttttttttttttgagagaagtcttgttcttatcccccaggtttgagtgcaatggctcgatctcggctcactgcaacctccacctcccgggttcaaacgattctcctgcctctgcctcccaagtagctgggattaagtcccctgccaccatgcccagctaatttttgtatattttagtagagacggggtttcaccatgttggccaggctggtttcgaactcctgactgcaagtgatccacctgccttggccccccaaagtgctgggattacaggcatgagccactgcgcctggcctattattattattattattattattattttgagacagagtctcgctctgctgcccaggctggagtgcagtggtgtgatctcagctcactgcaagctccgcctcctgggttcacaccattctcctgcctcagcctcccgagcagctgggactataggcgcccaccaccaggcccggataattttttttgtatttttagtagagatggggtttcaccgtgttagccaggatagtctcgatctcctgacctcgtgatccgcccgcctcggcctcccagagtgctgggattacaggcgtgagccaccacgcccggccttaattattatttttttgagacacagtctcgctctgtcgcccaggctgggactacagtggcacaatctcagctcactgcaacctccacctcctggtttcaagcaattcttgtgcctcagcctcctgagtagctgggattacaggcacccgccaccctaccccactaatttttgtatttttagtagagatagtttcaccatgttggccaggctggtctccaactcctgacctcaggtgattcacccaccttggcctctcaaagtgctgggattacaggcatgcgccaccatgcctggcccaatttatttatttttgagacaggtctcactcaggctggaatgcagttgggggatcatggctcacttcatcctcgatgtcctaggctcaagcaatcctgcccagcctcctgagtagctgagactacaagcgtgcacccatgcctggctaattttttatttttttgtagagatatggaccggctgggttgtccaggctggtcttgaactcccagcttcaagcaatcctcctgcctcggcctttcaaagtgccgagattacaggtgtgagccattgcccccaggcatgatgaaacttaatttttaaaatattttttttcttacagaggtagggtcttgctatgtctcccaggcaggtcttgaactcctgagctcaaaggatcctgccgcctcagccacctaacatttcatcagtccatgatgaaatgttttttttttgagacagagttttgctcttgttgcccaggccggagtgcaatggtgtgatctcagctcaccataacctctgcctcctgggttcaagtgattctcctgccttagcctgctgagtagctgggattacagatacgtgccaccatgtctggctaattttgtatttttggtagagacggggtttctccatgttggtcaggctggtttcaaactcccaacctcaggtgatctgcccgccttggcctcccaaagtgctgggattataggcatgagccactgtgcccggctgaaaattttttaattttttttttcttatagaggtagggtcttgctgtgttgcccaggcaggtcttgaactcctgagctcaaaggatcctaccgcctcaaccacctaaagtccttaagtccatgatgaaatgttaaatgccatccacgtgccacctaagcatgcgtcacaccatcaggattcctgcagccccgtggacatgccgtactgaagacgccacagttctgtttagaatactccgtgcccacatctaatgaggacctggtgtgtccccttgtctgcgggagtgctgcaggtccccagctcctaggagtgcagtgttcctagcatgttgatatttccaaaacacttcccagccacctctgccattcttcattttaggaggaaagtgctcagagacaaaaaacagctggcaaaatcttcagagccgaggcgtccactgggcaggatgccccgaggcaggcccaggcgaggagctgggcatcacagggaaaggccgcctctgcagagggggatgagagcgaggtctcggagcatctcagtgccagctcggcttctgccatccagcaggacagcacttccagcatgcagccaccatctgaagcccccatggtgaacacagtcagctcagcttattcggaggattttgaaaactctccaagtctgacagcatctgagccaaccgcccattccaaggagtctcttgacagaacactggacgctttgtctgaatcctcttcaagtgtgaagacagaccttccacaaacagccgagtctaggaaaaagtcgggcaggcacgtgacaagagtgcttgtgaaggacacagctgtgcagacgccagatcctgccttcacctacgagtggaccaagggtaagccttggggcccgtgggggccggggcagccgggacaggagctcagcgtgtggtttacagcatcctgggagacacgtgggagagctcaggttcctgagatttgggctcttgttattaatcacctggaggggttggccaagcaaggtggctcacgcctgtaatcccagcactttgggaggccgaggcgggaggatcacttgaggtcaggagttcaagaccagtctggccaacacagggaaccctcatctctactaaaaatacaaaaattagctggctgtggtggtgtgttcctgtaatcccagctactcaggaagctgaggcttgagaagaacccgggaggtggaggttgcagtgagctgagatgatgcccctgcactccagcctgggtgacagaatgagactctgtctcaaaaaaaataaaagtcacctagggaccttggctcaccatttcctcttccatggacgagggacagccgccctcgtgtgtcccgatgtcttcctagccctgaagcattcagaaggatcagaaccaaggactagggtagcacctcccacaggatgattcacggggggactccagcaaggtctggagacattattagttgtcacaactcagggtggggaatgctatcggcatctgctgggtggaggccaggggtgctattccacaccccgcagtgcacaggatgcctttgtcctggagaatgaacaccctgggtgactttccagatatttctctctctctctctcactctgtttttagagatggggtcttgctatgttgcccaagctggagtacagtgacccaatcatagctcactgcagcctcaacctccctaggctcaggtgatcctcctacctcagcctcctgagtagtaggattacaagcatgcgcccccatgcctggctaatttttatattttttgtagagacagggtcttgccatattgcccagcctggtctcaaactcgtgggctcaagcaatctgtcagccttagcctcccaaagtgttgggattacaggcgtgagccactgcacccggccctgtatcttttttttttttgagatggagtctcactctcttgcccaggctggagtgtagtggtgcgatcttggcttactgcaacctccacctcctgggttcaagcgattctcctgcctcagcctcctgaatagctgggattacaggtatgtgccaccacgcccagataatttttgtatttttagtagagatggggtttcaccatgctggccaggctggtctcaaattcctgacctcgtgatctgcctgcctcggcctctcaaagtgctgggattataggtgtgagccaccgcacctggccccctgtataattttaaaatgttctttgtagagacagggtctccctatgttccccagcctggtcttgaactcctgggctcaagtgatccttccacctgctcatgttggccccccaaggtgctgggactacaggcatgagccaccatgcctggccttcgggcatttctctcattcccagcttcagtctcggctcttgctggtggaaaggccccattcttttaaacattcccatgttattattttattttatataattttattttatgagatggggtctcgctctgttgcccaggctggagtgcggtggcacaatctcggcccactgcctcctccacctcctgggtttcagcgattctcccacctcagcctccccaatagctgggactagaggcgcctggctaataaacattcccttttaatatctcttttctcatccatatggctcttgacaaggtagactggatgtgaaaaatgatgtagttcccagcctggccaatatggtgaaaccccgtctctactaaaaatacaaaaattagcctggtgtggtggcacgcatctgtagtcctagctactcgggaggccgaggcacaagaatcgcttgaaaccagaaggtggaggttgcagtgagctgagatcgtgccatagcaccccagcctgggcgacagagtgagactctgtctcaaaaaaaaaaaaaaaaaaaaaaaaaggcaatgtaattctcactggatctatttgttttgatttgggggcttaacctaacatcagcctgacgggccccccaggagagggtgagtggtgtctgtttctcaggagggaaagtcaatcacatggactgagtcaaatcaccttggaggtgttaaatggtattttcaacctgggatctgggctcagaattgtttgtgtctctctgcacttctgtccatatttttggcaatttagggatgctttcatgaaacactggcgaggctgttttcctagactaggactgacagggaaaggagaaagaaaaaacagcagccataaacacgctggcctcagagcccagagaacacgcaacatcctgaggtcaacagtgacccttagaagaagggctgggaaagcacatcctccactgctctcgactgcagccaccgtgagccggagccaccgctgcacccagctaggatacccgtgccttgagccaagaaaacctagcagaaaaatggaggcagccttgggaaatacttgaaaggggaagagggtaaaaaaaagtaaagaagggccgggtgcggtggcttacacctcagcactttcagaggctgaggcaggaggattgcttgagcctaggagttcaagaccagcctgggcaacatagggagaccctgtctctacaaaaaattttaaaaattagccaggcgtggtggcgcacctgtagtcccagctacttgggagacagatgggaggattacgtgagcccaggaggctgtagtgagctgtgatcatgccgtgcactccagactgggcaatagagcaagaccctgtctcaaaccaaaaaaaaaaaaaaaaaatgcaagagtggcgatcaccttcagaaagagggaagaacaaggtcacgtagtttattccagggtcgtatctgtggacccgaaagtcatttctctgcgtcctgcctgcttacccctctctttgtccccgagatagtggccagcatggcagccatggggcctgccctgggaggcgcctacgtggacccgacacccatcgccaatcatgttatcagtgcagatgcaatagaaggtaacagcccggctcgggggatccttcctgtcacattttacaggactcatttcacctgcagattcacacccactctggaggtgtggcaccccttgcatgctggcttccaggggtccattgggcagggattattgcagccacaggcacctgccatgaggagagaaaaggtgtggatgcccttgaaccttctgtctcttgcaaagagacaccaatgtcacacaaaacaagagggtgaagagtgatgcttctgtgccctgcaccccaacaaggccactttttttgtttgttcgttttgagacagtctcgctctgttgcccgggctggagtgcagtggcgcgatctccactcactgggacctctgcctcctgggttcaagcgattctcctgcctcagcctcccgagtagctgggattacaggcacctgccaccacgcccggctaatttttgtatttttagtacagacagggtttctccatgttggccaggctggtctcgaactcctgacctcaaatgatctgcccacctcggtctcccaaagttctgggatcacaggcctgagccgccctgcctggcacaagaccacttttgttttgtatgttccccttggtggcattacatcaataagccatagtttatttcccctgaagacatgtatttgactgatgctgagttgcacagcctgggtagacattcccttgcctcctgggctgagtctgtgtggccctcacaaaggctccagtccagcctgaggcatgagggaggggccccagcagccatcttagagagtttagtctttgtcgagtccagtggagccaataaaggcttgtgatacacgtaggggtccatctggtacctactatttttttcccttttcaattttttaattttttttttttgagacggagtcttgccctgtcacccaggctggagtgcagtggtgtgatcttggctcactgcaacatctgcctcccaggttcaagcgattctcctgcctcagcctcccaagtagctgggactacaggtgtctgccactacacctggctaatttttttttttgtttttttagtagagatggggtttcactatgttggccaggctggtctcaaactcctgatctcgaactcctgatcttgtgatccgcctgcctcagccttccaaagtgctaggattacaggtgtgagccactgttgcttaaacccaggagttcgaggctgcagtgcgctgtgatggcaccgctgtactccagcctgggtggcagagcgagaccctgtctccagaaaaaaaaaaaaagatttcagagagcagcctggcacctgagcggtggggggggggctgcagaatttgtggggccccagcgaagccaccgagtaacgcggagctgggtcagccctgaccgcttacagcccggccgtgctggcactccatgatgtgctgaagcagcagctgagcctgacgcagcagttcatccaggccagccggcacctgcacgcctccctcctgcgctccctggacgcggactccttccactaccacaccctggaggaagccaaagaggtgagcgcagctccccatgggcaggggcagggcagtaggggagcggcagctcccagaggccgggccgaagggatatgggccggggcctgggctccagcgctcagcccagggctgcagggatgcagtggggccatcacctgtccctgtggagggagcctcatttcctgccaccctgtggcaaaagctggtacagggtggggtgctgagctcctgcaccttgcagccagccccgcctgggctgtgtgacctcagactaaagggacctactgttcgtggcactgttttctcccatgggaggggtcctgtccctttccctgagcctcctgagacatccccgagatggggccagaggcggcccagctgttctcctcagcaatcaccctcacctctttttttaccctctaagaatttttatctgattaccagccaggtgccgtggctcacacctggtgctttgggaggctgtgatgggtggatcacttgaggtcaggcgtttgagaccagcccggccaacgtggtgaagccccatctctactaaaaatacaaaaattagccaggatggtgacgggcgcctgtagtcccagctactcaggaggctgaggcaggagagtcgcttgaacctgggaggtggaggttgtagtgagctgagatcgtgccactgcactccagctcgggtgacgagcaagactccgtctcaaaaaaactttttaaaatctgattaccaaaaattacgtggctgttttctgaaaatcttgttgcagagatgtgtaacctgcaagttctccttaatttcagaggtaactattaccaagctgatatatatactccttcagactcttgtatgaaccatagtatgcgtatttcttttttttaaaatttttttttgacggagttttgctcttgttgcccaggctggaatgcagtggtgtgatctcagctcactgcagccttcgcttcctgggatcaagcgattcttctacctcagcctctcaagtagctgggattacaggtgcctgccaccatgcccagctaatttttgggattacaggtgcgagccaccatgcctggccacgtatttctttatagaaatggcattatactatatgcagtcctttatggtgatctattcataaacttttttttttcttttgagactgagtttcactcttgttgcccaggctggggtgcaatggtgcaatctcagctcactgcaacctccgcctcctgggttcaagtgattctcttacctcaccttcctgagtagctgtgattacaggtgcgaaccaccatgcccagctaatttttcatatctttagtagagacagggtttctccatgttggtcaggctggtcttgaactcccgaccacaggtgatccacctgcctcggcctcccaaagtgctgggattataggcgtgagccaccgccccctgctttaaacattttacataacaaatttttcagtgtttatttctaaaaagtgatgttaaagccaggtgtggtggttcattcctgtaatcccagcactttgggaagctgaggcagggtgggtcgcttgagcccaggagttcatgaccagcctgggcaacatagcaagactccatctctattaaaaaatacaagaaaactagtttaagtttagcatagtggtgtgtgcccgtagtcccagctctctgggaggctgaggtgggaggatcacttgagctggggaggttgaggctgtagtgagggagaaagcgggactctgtctcaaacaaacaaccataatgcaataatacacaaaccaaatttactaagtatcaaggaatatccagtgttgagatttctgcttgtctgatttaaagttgtgtgttttgttccgatttggtaattcggatccaaagtccatactatccgatatgtcctttgagcctcttaatctagagcagcgaccggttctcaatgctgagcggttggggatcccctggaagccctgtgaaagcgatgctgggcccgcaagcaggcggggtgggcctggagctaggcgtttctcccacatgccccgggacgctgctttggaactgtgccgagtcccctgcatgccaggcctctcgtttccttgtggtttatctgctgaagagggcaggttgtgagtcccacgggtctctacaatgtcaactttgctcattgcagccctctgggggctttgaactcatgcctctgttgggcgtccatcagcccatccgatgcaggcagaagccatctgactgtgccacctggctgcagcccaccatagctcccagctgcttgctccaggcgcttctccctgatctcagccactccaagggcactcacaggcacccctccctttctctgtcagggctcacccctcgcagggctgaccctctaccctgtgttcccacagccccgtgcgccaacctgtcacacacatcctgtggttttacacttctgtcactgacaggagcctgctggggacaggtgctggctccactccctcctccagcaccctgtctcagagtgtactgaggtgacgatggtgatggcgtggtctgttctctgcctgacagtacattaggtgccacagacctgccccactgaccatggaggatgccctggaggaggtgaacaaggagctgtgagcgccagcaggtggagcttgacgtgacgtcttaacaaaaggtatcccgtcctgtgtactcagtgcacacacacgcacacaaacatagagctcatcagtgtccaagtgtgacgttccgtggtgggggcaggtggtactggggtgatggacacacacacacacagtcagcatccaggtgtgacattccatggtggggcaggtggtgctgcggtgagggccccagactcctctgagccaaatcccagctcagtgacagctctcccagcagcatgcccagctctatgacaccacaggccagtggaaatagaatttcagtggagctgtccccactcacagcaggacaggggccaccagcctctgcagagcagctccacccaggcaggtcctggcatcccagtgagccagagggagacagggtggatgggagaagccctgctcgagggtaaggacatgggaccaggtcagcacgctggggacgccatgtgagcccctggacacggcctctgaccccaggctgcacagctcaaaccaggacatgtgtctcctcactcagcccgtgcacacttctgacttacacatgtgcgggagaaaggtctttaaaaaaaggctttatttgaaggcaaaacaatgaaatccacaagaaattactaacagcacgtgtttacgttttatcctgaatcatacattttaacaattcacagctacaggaaatctagaacaaaatcaaatattcatcacgttgggttgaaaagttggaagattttgcatcttattgaaaagaatttttcaaaaatgtttctgtacaaatgaatggaattgcaccaggctgcccatggacaccaggtgtggccgattcccaacggtcacccaccagcttctggcaggagcagctcccctcctggcctcccctcccttcgggggtgtgaaatgaaatgatggagtggaaggcgctggctggggtcgggctccatgctctggatgggactgggccgtcgcacacgccagccggtgcagggttcttccaagtgcaaaactcaagcaggggacgcgacgggcacagactccgaggcagcgctcaacctgaagtgtcttaggctggtttcctgttagaatcttgtttcccagataacagcaaatggctacattccagaaaaaaaatatcaacttatacaactaaaataactgaactaagggccagtacgccttcgaagaattaggtttcagaatctcactgggcctcctctcaggtcagtattcttctttctagacctaaaccaaggagagtaaaaatgaaaaccctgcttcacttcgcaagtcaagtcaaagttttgtgtttctgtttttcaatccgcgggcagtcatggcactgggcttcggctttgtccctacacagccgaggggaagccaggtcagggccggtgggtgcggggagctggaggaaggagctggggtgccggctctggctcaggccaacccttcctgcacatgctcctcctggagcctaggaggaggcttcaatctgacttagggcagatgcacatccatcccttcgtggctgaagaatttactcgggcggagggtcttgtgttttttgcttcgctataaaggaaaacgagcctggggccctggtggctgcagcgcctcctggtgtggtttgtgggtggcacccgtgccctccacgccatggagcacggcgttcccactgggcatgcgctggtcttccttctcttcctgtggctctccacaagtggagacggtgtaagaactgagctgtcactgcaatcttcctctgccagtcagccaggaaggtcccacagccggcaccgctggccaccggcgcggctcccggcatgggcgcctacttacactcgtccctggccttcatgcgggcgatgaaggagtagctcttgttcctgcggtagttctcataggggtcatccagagccacgcccacgcctttatactggtcccacttatcccggacgtccccgcccttgatggggtcctggatcccttgctccttcgcaccgaggccgcctgagccgctccagcctggaaacagagacgcagtcacaaccacaacaaggcggaggcagatgggggtgcacgtggggggctgaatgtccagacaggcagtgtagacatgggaaatgggtagagagaacccgcaggccggccctgtctagagggtctgggtggagtcagaaccggcctgactccatccatccccacatgcactgaggaagagaaagcgctggtgactcccgggcccagcacgcgtgaggacccatcccgcgccctccccattccctcgccttacccatcttcaccagcatctgatggcctttgttctcttctccgagccttgagtcagggatgggaggcgccgaattagaacccagaccagcagaggaactaaaatcgagacaggttattctttttaagaagtaactgagacatttattggaatgacagtgatgaggacctcacagccgcagcttgcgtgcatgctcactgtcaccaggtgacaccgtatgcagattttgcgtctctacccgtttatcctgtctcagctagataagggggctccagacgctggcccccaccccacgctcagcattgagagcaggacacctccaacccagatggtggttagaaagcagaccccagttactgcctcaggcttcgccaagtggctactgtggtgaagggtgaggggtgccactgtccccgggctaatgctggcggcctcctaacacagtctcctaaccaccaatgtttccacattcacagcaaagcaccgcagcttcccagagttaccagcgcagcacttaagacaggatcttacggcggggtggggctcctggaccgtgaccggcgtcttcttcctggggagtacgacttggaccgggaccgcgactgggaccgggagcggcttctggaggagcgcgacctgctccgacttctgcagggaagggtgcccaagggtcagcagcagccaggcgtcgtggggaggccacaggaagaggcctcaggcactgccctgaggcagcctctgcctacctagatctggagcgggagtaggaacgggagcaggagcgcgaccttgaccttgagtacgagcctgaagacttggaggatcttgagttggagcgggaggaagaacgccctcgactcttggatctgctccgagacctcgagggtccgctgtggggagaggcctgatgatcaggtgccccagtggatgggctgcacccagcccaccctggccctcaggttcctagaccaccccagatgcaggggctctggctgtggatgtggcgccatagccacagcaacggtaccaagttcctaaatagtgtggccgagcctgctgctgtgtgaattcaggccttgtggaaaacaccgccccataggcacaggctgtgtgagggtggacgtgatgagtgtatctggggtctgctcccacccatcacaagctgtggaccctggccccccggccactgcagacatctgcgcttttacctgttcctcttctcctggcctttcctccgccgggcccgcatttttgctcggaagaactcatagaggccgttctgctcccagccttcactgtaagacacggcattccgtgtgtgaccacgtgacacccacccacaaggaagtcgtgaaaaagtcatcaggagttaatccacagaaccttggagagtacatggccctgtggctgtgggctccgagcatgggcgcagtagagcttggttcagtgttcccacagggctgtcctcctgcagcccagtggctcctctggtgcccacgcccttgccaccctgctgttccgctgaggtggtggggacccatggtctgtggaactgggaaacaggaacactgactcatgggtggacaggcctgcagcccagcacaggaaggaggggtgaccactgggaagggtgggctgagggccctgtggcagccggctgcttgagacgtgccgccgtgccacaccttccctaacttcttctgatgtgtctccattaaaacgcccttcattgagggccacgtgtgtgctgtgcctgtgacacacacttgtcactcaggcggggggagggcagtttctcctgagggacagccacattttctagcctggacagaaggtgtggttgcagggagccgggagaggggacagaggcctcccgcccaccccactgacctgggccccttacctgttcctgggcctgtcgtgggacggggggctgtagaaggcctccactgcagccagcagcctctcgctgggcggcatggggggtgggaggcggatgtctttagggtccaaaggcttgtactcgtgatcttccagctgcagcagagaaccccagctgtcaccatgcctgggcagagccctctcaggcccacccagggtctgcaaggagtggggtcagggcagggcccaggttcagtgtcaagggtaccctgggcaccagagctcctcatgcttccctcttggggatcccactctcttgtaggacctcagccacaccaaccatggtgggtcatagctgctctgaggctgatgacagtcacagggttctctcttcagaaaatcacccacaggggacatggtctccaaactcaggtgacctgaacaccctctggtttattcagacatgcagcgggcccctcacgtcaccctttgcttgcaatgcctaccctgggcccccgctcagaacagcctcagccccggccctggagccccctggcctgtatccttcttctgctccgtctctgtcctcctgttgaggccctgccctgcctggcttgcctgggcccccgcccgcagctctccctgctgcccatggctccgtgaagtctgcctggacttcaggtggatgtgtctgagggggtgggaagtggcagtggccagcatgcccttggaggccccaagccccggccctggcctccccaaccccccctttttttttttgagacggagtcctgctctcgcccaggctggagtgtagtggcgtgatctcggctcagtgcaagctccgcctcccgggttcatgccattctcctgcctcagcctcccgagcagctgggactacaggcgtctgccaccacgcctggctaattttttgtattttttaatagagacggggtttcaccgtgttagccaggatggtctcgatctcctgacctcgtgatccgcccgcctcggcctcccaaagtgctgggattacaggtgtgagccactacgcctggccagacctggccccttcttgcctcacctcttgccctatgctccggccatcccacagtggtaccagctgctgccagccctgcccggcttctccagggccacccccctccctgtgtgcttggtaggcacagctcacaggtggctccttctaagacattccctccatcagcagccctgggacaaggtgcttctgaggccctggaccaagaaggacgaagagaggactcgagcctcatagcctagctagccccacatggctgaagctccctgtggtgggagggataggaggggcagggcagggcagacatggtgtcgctcacagccacaccgtgctactccggttcggcacctcccactgacggatcagggtccctagggagtgggagatgaaggggagccccggaaggcacccggtcccgtgcattcacttttcacaaggagaaacggggaccagtatggtaagcgtgctcagcttggagcccactgtggggcattaccttcacgaggggggccatcagcccagcagggagatcgaagtagggcacattggggaccaggctggggtcatcgtggttgatgtggggtgggccctgtcgccgcatgtgtgggggctgcccgttgaagccatgggggggagggccgaagtcagggtgctggggtccagcccaaggcgggtgctcgttgatgccaggatgaggcatgcggtggccagggtggtggtgagggggccccatttctgcaaaacagagacttgcctcaggaccacaggccagtcaggatctcccaggcgacaagtgctggaggggaggggctcagtgaagggccaggagacgaacccctcctgggagcctgtccagcatcttctctcactgcttaagaccaggcagcaaggcaccgaggagccaggctccgaggggcctgtcccgcacccataggcacagccgagggagcttgaggctgagagaagagaaccccaaaaccccaaaactgcacggtgagggctaagttgtgaccctccgaatccatacgctgaggtcccagcccccagtagctcaggacggaactgtatttggagacagagccttcaaagacacaaatgagttaaaatgaagccatagtggcccgaatccaacgtgactgttgccgttataataagagattaggacacagacatgtagagagaagacggtcacctatgagccaaggagacaggcctccaagacactaacctgaacccgccacacctccaccttggacctccagcccccagatccttaagacaatacattccagctgttgaagccgtccaggctgtgggacttatcatgtcagcccaagccaaaaagtaaaagcaataaatgtgccaagcggtcttcaagctgcatttataatcagaaatgtatttaaagagagaaggctgggcatggtggctcacgcctgtaatctcagcactttgggaggccaaggcgggtagatcacttgaggcccagagtttgagaccagcctggccaacatggcgaaaccccatctactaaaaatacaaaaattagctgggcatagtgactgatgcctgtaatcccagctactgaggaggccaaggtggaagaatcacttgaacccaagaggaggctgcagtgagccgagactgtgccactgcactccagcctgcgtgacagtgaggctcagtctcaaaaaaacaacaaacaacaacaacaaaaggccaagcgaggtggctcacacctttcatcccggcactttgggaggccgaggcgggcggatcacctgaggtcaggagttcgagaccagcctgggcaacatggtgaaaccctgtctctactaaagacacaaaaaattagccaggcatggtggcgcacacctgtaatcccagctactcgggaggctgaggcaggagaatcatctgaatctgggaggcggaggttgcagtgagctgagattgtgccattgcactccagcctgggcaacagggtgagactctgtctcaaaaaaaaaaaaaagtactaaaagattagaaataaaatcaataacaaagatactaggcatggtggctcacatctgtagacccagctactctagaggctgaggtgggatgactgcttgagctcaggagtttgaaagtagcctggccaacatagcaagaccccatctctatttaaaataaaataaaatttttttaaaaaagaaaagtagttttttgttttttttttttgagacagcggtctgtcgcccagggtggagtacagtggtgcgatcacagctcaccgcaacctcagccttctgagcagctaggaccataggcgcccgacaccacgccaagtattgattttttaaacgaactaatacaacgggaaaactgatgcaaaaaacaagcagcagcagtaaaaagaacgaggccccgccctgccctcgccacgcccacccacggcaggaaccttttcctactggctctgcctcatctgcagccagccgggcctcatcagggcggcaaaactgagtctgtgcccccacttcctgagaacccaggccgggctcctcggacgtcccatgaccctgtgtctgtcactgtgcactcaggagcatggcagggccacaagcagcgccaccagcctgctcggcaggcgagccgtggatgcctccgccaggccctacccaggcgcccgtacactcaccggcagggaagtccccctgggggtagtcgaagcggtggggatagggcggccgctcgaaggggtgccgtggcgggaagtcgtcctgcatgaagcggggcgggaagcggttgaagttgtgggggtgcggaggctggttgaactgcgggtgctgctggtggggcgggaagggcccccggaagtgtgggggccgctgcatgcggaagggtggctcgcgctggcccccgccccagggcggctgctcgtgctggctgttccaggggccctcgaactggctgttccaggcggcgtcgggctggttgttccagggcgcgtcgcgctggccgttccagccggggtcaccgcgctgctcgccccacatgccctcatggctgttgttccagggggggcagtggggtgggccgccctggtggtgcgggtagggtggctgctctggcggctgcaagggaagggacaggcttgagccctgcgtggtctaggccctagtgctcggcagcatcacagcgctcggcagcatcacagcgctggctcagaccatggaggcgctgccctggccacgttgaggcgcctcctacgctgacgcctgcgaggatgctgggcacctgctctcagcccgcaccacatgctgctgcaaaatgaccagacacccaaccgctgcacccgcatctcagtcccggggctgtttctgccgctggggcgcgctgcacccgcacacaggccgcccgcgccacaaggtgctccccgctaccactgccagacaaacgccagctccctcgcccctcaggggcaggtgcagaggcacagacggtatcgcttctcagggcaccccaggcacccatggggcggggctcactctgacaccccctgccctgcctcactccccctctccccaaaagccgtctgctgggcagatacactgcggcacacacatccttgtcctggggtctgcttctggggactttcaaaccaagccagcatcttcctgtagactgaagacgggaggctcttccctcatcagcttctgctctggagacttaaagccaggagggcaaactccagcttgggcaggggaggggaggagcacagaggccaatgagaaggccggtgtctagggtcacagctgggtaactgcgctgacccctactaaggggaggctggcccaggctgccacattcaccaggcttccaagagaagccagagagccagatattaaatatcaggaactacttgtttttctttttcttaatttgagacagtctcgctctgttgcccaggctggagtgcagtggcgcgatcttggctcactgcaacttccacctcccgggttcaggtgattctcctgcctcagcttctcgagtagctgggattataggcgcctggcaccatgcccggctatttttttatctttagtagaggcgaggtttcaccacgttggccaggctggtctcaaactcctgacctcaaatgatctgcccacctcagcctcccaaagtgtgggattacaggcgttagccaccacgcccagccttgcttttcttttttagagacaaggtctcactctgtcacccaggctggaatgcagtggcatgaccatagctcaatgaagcctgaagtcctggctgaaccaatcttcctgcctcagaccactgtgtagctgggacgacaggtgtgcaccaccatgccagcttatttttattctttgtagagatggagtcttgccttgttgcccaggctggtcccaaactcctggcctcaagcaatcttcctgccttgagaaattacttttaaacgtgttaagaccccacatggccaagtcaagcaggccaggctgctgtttctcagtgtggactgcaggatgcactgctggcctagcgggcaccctcagtgaggggcgtgcccattgtcctgagcccaaccctctggtctgcaaaaagactgagcctggagacactaagggcctgtttccacacctacaaaacagggacaagaactgccccccccagcagagggtacctgcaaaacagccaccaccatctggctcctggccagcacttggaggtgggagctgtctttatgggggtgtccaatcttttgtgaggttcaatttcgtgtcctgaagctggggatgggaggctcaaagccacaaccaccaagtctcagtccagagccagtctccttgccatccttacacctgtccctgcagacagggagtcacctggaaaggccacgctgcgaagccaaccaggccccacgggcaagggggaaagtcacgccctggaagacccggggctgtgcctcagtgctgaaagtggacccagcacgctgcagggcatttcacagccatgctgtgccacataaggtggcccctgccttggcccaggggtatgtgacccatagcaaagctgcatctgaggcctcccaggggcaacacggctgacatttctgacattccccctttccttacaaaagcaccttgttctttccaggatgacaaaacactgacactcaactagcttaacctgtttaaggaggacaggaaacagaacaccctgccgtgccttgcagcgttaaactcccctgcactcgcaggacaatggtgatctatactacagagaagcccaaaccatcaaagctcggggaagggacgtgaagacctgtcacttgacctgtcccggagccacaggaagacagggctgtcactaacccagcataagctctgccacagaatatccctcattgttccccagtaagccactcaacgcccaccaactggcataggggaggctaccccatcaggccaagtgtgccccatctgctcccaccccaggttccaatcaatacctgctgctggccccaaggagccacggggtgaggctggtcaaaccaagggggcttgtttggtgggatctggtcgtgtggcccggggccccgggggccggcagctgcaggatcctggacccctcctggagcttcgtactctgaagagccaggcatctggatgggaggcttgctgtcatctaaatccaagtgacaggcagttagagcaggcctggcagcaggaggcgctgtctcctctccacactaccccagagcaaaccaggctaccgcttttagtgcccagtggatgatcgcttcaggacccactaaaaccatgactatcactggcttccaggaaggggacagggcgaggggaggtttcgaccttgaacatgacacacatctgtccttttcaaagctttacaagaaacaggcctcacttctgccttcttggtttgctgaagaatttctatccacactgaatttgattagacatctttactgtatctaattaaaaggtcatttccccacatctgttattttctattctatacaatcctcatattcctacaacaaatcttctttgatcagaatgtaattttaaaatcctttgctaggccgggtgcggtggctcacgcctgtaatcccagcactttgggaggctgaggtgggtggatcccaaggtcaggagatcgagaccatcctggctaacacggtgaaaccccgtctctactaaaaatacaaaaaagtagctgggcatggttgcgtgcgcctgtagtcctagctactcaggaggctgaggtaggagaatggcgtgaacccaggaagcggagcttgcagtgagctgagatcacgccactgcactccagcctgggcgacagagcaagactccatctcaaaaaaaaatcaaaaacaaaatcctttgctagattctgctaagatttccttcagtatttccgtgtctttttcagaagtgacactagattgtattttctgagacagggtctcgctttgttacccaggctggagtgcagtggtgtaaatgcagctcactgcagcctcaatctcatgggctcaagtgatcctcccacctcagcccccaagtagctgggacgacaggtgagcaccatttttctatttttagtagagacggggtttcaccatgttgcccaggctaatctcaaactcctgggctcaagcgatctgcccatcttggcctcccaaagtgctgggattacaagcgtaagccaccatgcctagccaattatattttcagtctgtgcattgtccttcctgcctgatgtaatagttaccctagtcttggggaatgatctgggtacctttcctctatttcttttctctgggaacaggaaacagatcttctgctgttcaggaatgggatggttgtagttttactctaggatcacctggctcgtgcttgtaaatggatgaaaacctgggcctaggagcaggcctgggacgagggaacaagaactgagtctgagggtggcagactgctttctgactacactcggtgcccagcctctgggggctgtttcctgggggcaggctgagctgagggagccccgtaccaggctgggtggtgggcgggatggcaggggcaggtgctggggccgggggtggagcaggcggtggaggcgtggccttgacttcagcctccatctgcggcatctggagctgctgctgctgctgttgctgctgctgctgctgctgggccaggctggtgacaaactcctcgtgctgcgtcttgagggtctggatctgctgctggaaggccagctgcaccggctggaccactgaggagtactcgttgatgagggtggcctgagagagagaagagcacccgctgctcagtatgcggccttggggctcgctgcctggcgccagaggacaaacgcctggaaagcagcagagcctgggggacctggggcaggtggacagggaaccgtcacgtgaaacagccaacacagtctgggcaatcagtgtgcgctgggatctggccagagatttggggatgaggatgttcgctgcagcgtgttttacgactccctgataacagaacgagcaacgacagccgtgtcctggccgcttcgtggctgctcagcgaacactgcccaccaacattctgggacacgctcatgggctctgcctcccactcgccatgtggctctcagcaagaggggctgccacagcctaagccacgtctgggcttcctcatgcttccaccacaccggaacatgcctgaccaccagagcaaatgggccatgtgcaatgactccgaaaggccgcctggttctagtgttccaggaaagtcagggagacacacctaaggcctgggaaatgtcacctgggactctctggtcaacacacactggctactcctagcacaggcaggggacatgggctctctggctgctggggtggcagctgctgtccccacactcccaaaccctcctggggaacccgccccagctctagggtgaggtgtgggtgggcagggacactcacctggtactgaccaagccccagggctgggctctgtagctgctgaatgatggagtcatcgaagtagccgtttttctcccagagctgcaggagctggcggtgggaggagagagaggccgggtcagtggggaggggaaaggcctgtgtgtcccggtcttgcccaacccccggcccggggcccacgcacccgggcgatcttctgctgcttgtcttcctccacggccaagaagctggtgcagtagatgggcaccacgaccttctgcagggcggccagcagctcccgggcctgcttgcgctggctgtgagggagagactttccgcgcgtcagggccctggggcgggacccggccacgcgcccgttaccatcgcggctccagcctcagcgccctctgccttctcgggaatcgggtccccaacccggtcagggcgatggctgggctcccacgagacctgtgctggtgcctgggctcgaggaagggacagatggaaaaacagcaagcaggggagggagagaacgtggcctggggccgttctgagcaaggccttttggtccagtccccttgataggaaataaccttccctccttccctcttgggtggcgctgcgggtgaagggatatgggccggcgggagcccctgcctgtgtatgatgggcgggatgggactgctgcggagtgggggtcttgtccttgtcactcactatgcacaaggaaacctcggcccaggccaggcctcttgggagaaggagggagggtgcccagtccctcaggaacctagaacactttagaagagtgaccggatgcccagcggggggaggcgccgggcccatgtcctctcagggctgctgtgcagtgctgcacaggacactgtgcatacctggcctgggaggcccctgccgctgcgcagggagatggctgcccctggggagggacgcaagacaggaggggagcagctggaagcccctcagccctcagcttgccgcagggggctcaggggagcaagggcctgggctgggcgagcagcacttggcttcggacagagtagagctagagaggcgcgtggctggagaatgcgggaaactgtgcatccgtgcaaggcacccgactcagaggcagggagaaatggaggcatgaggaggagcagaagggcagagctggtgccgagccgcaactcacttcccagcaggagagaaacagggactgaggtggggaggcaagagggactcaggcagtgctgcatgtgatagatggggcgagatgggtgctggcagcctggcccactgtagaggcacacgaggcgccaggccaggactgctgcccgctaggctcagtagcaatgcttgtctcctcccgcacgtgcgggcctttggcctggggttctattgttttttttttcttttttgctaatttttgtgagaagggccccagtgaccctgtagaaggaaatacccacccaaccttggggagggtggagacagcaacagtgggaagggtgagggctgggtggggacagagggtcggcagatgtggctctgttgaagcctgagagatgggtcagggctggagaaggggatcccaaaggagggtcctgatggctgagcaaagtcaggtgaccgcgtgtgtgtgcgtgcaaatcagtgacgagggcaggagacagacacagaggccaaggaggccgtggctgagaaggcaacaaggagacgccaagaagctgccccatgagaggaaggagtgcaggggacagtggcccccaggagacagcaatgtgacaggtgaggccggggtctaggggagaggacagggcatgcagcgaaggtgcacaggacacctagacctcgcagtcctggagacagaagcctggtggctcacagagaccccccacccggggtccccggacaagtgccccctagtctcgggacaggccaagccaagctaccgaccggagcaagcggccacccaggagggttgaggaggagcgcgaggaagtggcgctctgggcacggggtggcggcgctcaccagtggtgcagcacgtcattgatcaggtagatgaggtgcagccgcagctcgaagtgtgccccatcagccgtgatgcggttccggaggtggccggccatcagctcacagtgcggcggggacttggcattgctgaacatccagttcttcccggcctgcaacaaccgagccaatgacgagtgagcagggccgcggctcccccaggcacccactgcatccctgagagcgcgtcaccatcagctcagggaaggacacaccatgagcgtggggggcacagggtcccacagcctcaggagctccaggcgggagggaagggcacccattgtaacagcccttagcccagattggctacgacaggccctgcctcagggagggaccaagggaaagctgggctctgggaagtgctggcccctcaccgagatggcgtccttggtgcacgtgtcgatgatgggctgcaggaggttgtcaaactcgttcatgtctagctgggtctcctccagaagcttctgcatctgctgctccaccgcgtgggccacggccgctgtcacttgctcctgcgggcgggggtcggtggggtcgagaacacatgaggagggacccgcagcctgagccctccggcctggctcagcaggggcggggtggggacatggtggcgatgcccggactctgggctgctctggccatcagctcccttgcttgtccccagcaggaggagattctgtctctcatgcctgccgtgaatctgtgacagtccctcctggagtgggcagggcactgacaggacataccaggagacaacacctgccctccaggtaaccaaggaaaacactgcagcccagaggaacaaacaacctctgcaaaccaactcaacaaaaaacaaaggcggggcgcggtggctcatgcctgtaatcccagcactttgggaggctgaggcgggaggatcgcttgagcccaggagctccagaccacctgggcaacgtagcgaaacctcatctctacaaaaaataaaatacaaattagttgagcatggtagtgtgtgcctgtgttcccaactacttgggaggctgaggcggaaggattgctggaacccaggagttcaaagttaaacagtgagctgtgactgtaccactgcactccagcctgagtgacacagcaagaccttgtctctaacaacaacaaaacaacaacaacaacaacaacaaaaagaaaagaaaagaaaaaaaaagacaaatgaggcatggtgtgaacgacaggcaatagaagaagaggatacacccatggcctctagtgaagcaagaagggggcaatctcattcctcaagaggaaacaccggttaaagtgcgactggtaaaaacagagctgccatgcggaccagcggtcagttacggctggtcaaggcaggcctcccactccatgatgaacagaagctgagggtgagcattctggaactttcttttcttttcttttttttttttttgagatggaatctcgctctgtcgcccaggctgaagtgcaatggcataatctcagctcactgcaaccgccacttcccgggttcaagcaattctgcctcagtctcccgcgtagctgggactacagacacctgtcactgcacccagctaatttttgtattttttactagagacagggtttcaccatattggccatgctggtctcaaactcctgaccctgtgatccgcctgccttggcctcccagagtgctgggattataggctgagccactgtgcccagctggaattttctgagagcaatatgacagtgtgattttatgccctgaacctagtactgagcgtggggttggtgttttggaggtttggtattctattcctctcatttttctggcaatgcacttgtagtattttatttatttattttttctgagactgagtcttgctcagtcacccaggctggagtgcagtggtgcaatctcagctcatgcaaccttttcctcccaggttgaagcaattctcctgcctcagcctcccaagtagctgggattacaggcgtgcaccaccacgcccagctaatttttgtatttttcatagagacagggtttcatcatgttgaccaggctagcctcgaactcctgacctcatgatctgcccatctcagcctcccaaagtgctgggattacaggtgtgagccaccacacccagccaatgcacctgtattctatttggcgaaagttatcaaactgttggaccaggaaggacaaaagggtccttctggccaggtggatcacctgaggtcaggaatttgagaccagcctggccaacctggtgaaactccatctctactacaaatagaaaaattagccgggtgtggtggtgcatgcctgtaatctcagctactccagaggctgaggcaggagaatcgtttgaactcgggaggtaggggctgcagtgagctgagatcacgcctctgcactccagcctgggcgacagaacaagacttaaaaaaaaaaaagggtccttccccaaccaacagctccaggtgacctagctactgtgtggtggggccaatggtaggcaccagaggctgcctggccacagccattagggagcttcaaggtgcatacgtgccccacagtcccactcaggggggtccaccccagggtgatgggtgcacgcacgtccagtggcttcactgagatgagaagcagcctctgtgtctggcatcagggctgggggtgacagtggctgacatgcaccgagccctgggtggcagggggggccctgtcctcactgacacctgttattcattctgatgagcagacgcaaaaacagaggcacaggggagctgctggtgtctggccgaggaggcggcgggcccatacctgtctgagcgccagcaagtgctgctcctgctgctggaggttccactggctctgctggatgagctcgtccatggatggcgcgccctgggccggcgggatgggcgcggcgggggccagcgggggctgtggcaggggtggcatggtggcggctggctccagctccggggtctgctgcttgcagatgactggagggagaggaggaggggtgccccatgagaatgcagatgggggtctaggtgtccccttggccacctctcagccacaggggcctccccctccccagggactcaccatccacgagggcctgttcatagcctcatgcccacgcaaaccagctcctcctagtctcgggtcctgccctccctctcacaggatcccagcctcagcattccatcttcgggccgtcccctcctcggagaacctaggaagtcccctggccgctctctcgccagcaccatccagtccttgcgcagtgtccttccggtgcaagctaagcttgcctgcccacctcctcacccacctaggccccacctgatgcagaacccaggcctcagtacctctcatcctccgacctcctcggccactccctgacctctgccacttaagctacccattgactgttaagatgtcacagccaccgggcctctgcacatctggccagaaaggcacgaagccgcacccccgagcgcacactgcggcctcccccacacctgccttgtccttctactgactctccttgcttctccagcccttggggacagagacccctctgcattcaggggtgcatccagtttgaggcagcagtgagacacccattctgccggcagaagcctgggtcagggtgggcgcaggtcccaactctggccagatggggcaggtggtgaggtctctgaggaagggacccggctcataaggaggccctggacaagatgacctgcctctctctccgtcttggggccgcctggtctaaatgtgaccaggtacccctggagccctccagagccccactccaaggggaccaggacaaagccaaagataagggaggtggggtgtcaggtggaaggtgtcgcccctcactgggcgctcaagtcaagtctcggggctgactgtgccctccagtttgtgcacccaaagccaccctacaggatgacccccaacttctgcactgaatcccacccctcccactgtctgagggacactgcttattgatatttcttctatctcttatttctccaactcctccctctttacccgtccctccccagcagcatctaaacacattgggctgggcatgatggctcacgcctataatcccagcactttgggaggacaaggcgggtgatcacctgaggtcaggagttcgagaccagcctggccaacatggccctgtctctactgaaaatgcaaaaaattagtcgggcgtggtggcgggcacctgtaatcccagctacctgagaggctgaggcaggagaattgcttgagcttgcaaggtggaggttgcagtgagccgagatggcgccactgcactccagtgtgggtgacagagtgagactccatctcaaaaaataaaaaaggaaataaataaacacatcagaatattctgggttggaaacttctccctttaccccatgatccctctctaaacgatttctcagacaagactcactccagatcttcacctcccctttatctcagcctggtgcctgcttgccactccccgcacccccctccttcccccaggcagctgaggacaccctcactcaactcagccccccgggcctgtcgcaggtgcttgcctcccttggcctccatgtgttcgccccctcagtccctttctccccctttaccaacccctctcccgttggaccctcacatgctggggtgcgcggcctgtgttctgagccctgtcctccgctctacgcaaccgccgggcaacatgagctactcattcctgtggctgcgattgtgcatggtgtgattcctaaatccatcatctccattctggattcctgagctttggccctaaccaccaactgcacggcccactgtgtttccaaggggcctgtgtttcctctcaccccctacacctatgtcccctcctgtgctccccgcaccatggttggcaccaccatctgcccagaaacccaggccagaagtagcatgtgcctcccagtgacgagccacatagtgtcaaggcggcctccgagacatcactccaatcagtctatgtccccgctgtcaccaccatggatctgctgtcacctgcgtcaccccagaaccggtcttcctgcatcaggtcccatccctctacctctttttgacatggcagtcatggtattgccacttatggagtggtccctgggctacccagcggtgacagacggttatggaaccagaaagggagcatttcaaaacctttctagcagcgtgatggttcacggtccacattgttactgtgctttgcagaagttttggtccacacacaacaggttagaaacttaaaacacaacaccagaaatggtccttcaccacagagttcgtgaagctccattctacaacagttgaggcccaggctttaaggcgtggggtgcagaactggctgtactgtggctaacccagcttcacaacacagacctaaaccttccacgagtctctcccacgcttccaggatacactcctcactcctctccaagccaggtccccgactcctccccaagccaggcctccaactcctccccaagccaggctcccaattctgcacccccacctctggccactccaagaacccctcctactctgggcttcagccaccctaagctctgggttccccattccctccaagggctccttcctctgcccggaacacttttctccccttgttttcacctggccaactccaacacaccctttacatctagccaagatatcatcacccacagaaagcacttcttggctgggtacgatggctcacgcctgtaatcccagcactttgggaagccaaggtgggcggatcatgagttcaagagatcaagaccatcctggccaacatggtgaaaccacatctctactaaaaatacaaaaattagctgggtgtggtggcgcacgcctgtagtcccagctacttgggaggctgaggcaggagaatcgcttgaatctgggaggcagaggttgcagtgagccaagatcttgccactgtactccagcctgggcaacaagagcaagactccatctccaaaaaaaaaagaaagcacttcttggcttcaatcttcctgggctataagcataagcaccctctccttcctcataatggcaccagcttccaagtggccacccccccgccccagaaagggaaagcagcccttagctcagtcacccaagccaaagcaccgtctgaggtgtcttcctcccctgctcattacaccatcaggtcgtcaatatgcaactggcgcccaagttcatggattctaccccttcaccccacctgccccccatgctccctccctcaggctcaacctactgacttaattcagaccccaccatctctcacctaaacaactgccctgtttgctcccctgcaggcctcactgctccccaggctggtccctgtagcttgtcctacaccaccggccacacaacccaagccaccctctcccttgtttaaaactcttgtggcttcccgctgcctttagaaacggtttttttttttttttttttgagacggagtctcgctctgtcgcccaggctggagtgcagtggtgcgatctcggctcactgcaagctctgcctcccaggttcacgccattctcctgcctcagcctcccaagtagctgggactacaggcgcccgctaccacgcctggctaattttttgtatttttagtagagacggggtttcaccgtgttagccaggatggtctcgatctcctgacctcgtgatccgcccgcctcggcctcccaaagtgctgggattacaggcgtgagccaccgcgcccggcctagcaacggttttaaacttggtgtgctggggctaaggaaggatcgctctagaaacacataagcacatacaatattttgcttacgatttcaggcagctgatctctctccaccccacccccgcatctcaaacctaaataggcatcagaaaaacccctggattgagtgaaaaaacccaaacttttcccctggcagttaacactccaggtcaaactcttccctcatacaagcacattcttttattaaatagattctctactatgtcacccaggctggagtgcagtggctatttacaggcgtgaggccactactgatcggcacaggagtttcgacctgctccatttctgacctgggccagttcaccaccccttagacagtcgagtggtccccagctcccagggggtcaccatactgacactgaacttactgcacacactcaatcgacacagcgcactacagccctgaactcccgggctcaagcaaccctccagcctcagcctcttgagtagctgggggtacggtgtgtgccactgtgcctggcaatacacacataaactctctctctgtttcttgttcaagaaactgcccctttgcaatgttctactctctcagcctttcaagtttttgttgttgttgttgttagatggagtttcgctgtctcccaggctagagtgcagtggcacgatcttggctcactgcaacctccacctcccaggttcaagcgattctcctgcctcagcctcccgggtagctgggactacaggtgcccaccaccatgcctggctaattttttttgtatttttagtagagatggggtttcaccatgttggccaggctggtctcgaactcctgacctcaagtgatccgcctgactcagcctcctaaagtgctgggattacaggcacaagccactgggcctggcctcctttcaagctgctttttttttttagatggagtctcattctgtcacccaggctggagcgcaatggtgtggtctcggctcaatgcaacctccagctcccaggttcaagcgattcttctgcctcagcctctccagtagctgggactacaggtgtgtgccaccacacctgactaagttttgtaattttagtagagatagggtttcactatgttagccaggctgttctcagactcctaacctcaagtgatctgcccgcttcagcctcccaaagtgctgggattacaggcgtcagccactacgcctggcctcctttcaagccttttctttttctttctttcttttttttttttgagatggagtcttactctgtcactcagactgcagtgcaatggcgtggtcttggcttaccgcaacctccacctcccgggttcaagcgattctcccgcctcagcctcccaagtagctgggactacaggcgcgggccaccacacccggctaatttttgtatttttcgtagaaacagggtttcactatgttggccaggctggtctcagactcctaacctcaagtgatctgcccgccttggactcccaaagtgctgtgattacagtatgagccactgcaacaggcctcctttcaagctgtttaatcgaacaccaactgtgtgttatgtattaagggacaatgaccttgtaccttaatacaagacgagcgtgtagtcccctgaactacacgctcgccgaagccaaacagaccttgtttgggtcattgtaccttaatacataacacacaattggcgttcgatcaaacagcggacaaccacctctcaatgtccatctacctggcaaactcctagttattcatttaaacaatctagagacggggttgggtactgaacgtgacagatgtgatacctgccctgagcagccgcaccacctggtgactatccattattcaaaggccagctctgcttcctaactttaaacttctttagagcaggactggaatcctgttgcctaaatgaacgaacattgataaacacttgccaataactaaaactcagagggataattctttttgatttctgctgcaggcatctgaaatgcacaaaaccttgctggacccacagggagacggcaaagggggctggacagtgcctgtcccatggactcccatccggcctctatcacttcctccctagaaaacactaaaacaatcacgctactcctgctaatctccgtcatcagtctgcaaaacaacagcaaaatccctgatccagagcccaggggggaggatcgaaaacctcgttgttctccattacagtggcacccagcagccgctctgtgcagggccgtgggaacagcggaacagggatcgtgtggaccgagctgctccacttcaaagaataaacgacccgaaagaaagaggtttgtggcagagcccggactggaatccgagaaaggaagcgctcgatgggacggcctgagtgccggaggggactcacgctgctgctgctccagcgccagcttgcacttgtagtaactgtagaattcgcctccgaaaagaaacgagaatttggggttgtccttctgcttctccatagtcatcttctcaaactcgggcccattgcgagccacgaactgggcgagcttgtcgatgacatttcgaagctcctggtctggaggacggagaaaaggccacgcggggcgtcagcgaggaccgcccaaagccgggggactcggcgccccagcccccgtccgccttgccggggaccccaagggggtgggccccgaagaggccgcccttgtacgggtcccgataggggccacacgctcgccgggaatgcggggacccacgggagaggccgcaggcgaagccgcgaggccgagccccgccccctcccagacccggggactccgggaggcggggccggccaataggaggttccggggagagagaaacggtctctcggccggtttgggtctcaccatcggggggcagcggcatctccatggctccggccgcggggaacgtcctccggcgccacacgatcgaccaccagcgccgtctgcggaagccggccggaagtggcgcgagggagccgtttacggcgggcttctagggccgcttccgcccgccacttacggccgtcgctgggaaactccggaagtgagagcgggaggcaggcgggaagaagccgcgcgatgcctggcgcgcgggaggggctagcgacgcgcacgcgcagaagtttcctgacactttcgcagagtgggtccccgtcgcgcggcgccgcggaaaggctggaacggcgcgggtgggtgttagtcgagaccggggggcgcggggcgtgccccttggtcggcgtcgcagcccgatgggctggctggttgctacctccgggcgaccaggggcctggggacttcgtgcctgggccagggtctctttcctttcgcgggcacagtgaggagactgcgaggtgaggtgcgtccgggtggatcccgggctgcggcgactgtcacattctccccggccagaccggaggtggagcagaactgggggcgacgagcttgactgggattgcagctggacgtatttaggttcaaaacatcctcctcctggctttcttccgctccactctttggtcaggaagactggggcggggtaccccccaacccatgccctcaaattgctggcctagagggcacagcgcctttctaaaagctgcagttgggttgcctctaaaataatgaagctaacccttgctaattgtggggaaaagatagccagaagcagcaaatttctgctgtggacgtccgatataaactgatcctcttgagatggttaatgcttagttggctatacctgccccccgcccccgccgcttttttttcctttatccgtttttttttttcttttttcttgagacaaggtcttgctctgtggcccacgctggagtgcagtgtcatgatcatagctcactagccctgaactcctgtgctcaagtaatcctcccgcctcggcctcccaaagtgctaggattataggcatgagctactttacccagcctgtttttttctgtgcaaataaatgcacatgtattttagattagtttcatttttattgttaacagcatttttccaccagatgcttatggattgacaactctacatcaagtgttgctgtaggctaggaatcaacaaaactttttgtataaaagggacagaaagcaaatattttagactctgcaggtcaggaggcaagatcaaggatttttttttttctaaatgtcctctagttcatattttctcatgaagatcgaggatcttaattgtttggtttttttttttttttgagacacagtcttgctctctctcgcccaagctggagtgcagtggtgtgatctcggttcactgcaacctctgcctcccgtgctcaagcaattctcctgcctcagcctccaggggagctgggactacaggtgcgcaccaccacgcccggctaatttttgcatttttagtagagatggggtttcaccaggttggccatgctggtcttgaactcctgacctcacatgatctgcctgccttggcctcccagactgctgggattacaggtgtgagccaccctacccagccttatttaggtatttctataaccagaaagaaaagttcataaaatttttgttggtgaaaatcaaaatatgataactgagtagtttcttaaatacaagttgctacagtttgaatgtttgttcctaatccccagtgaaacagtattaagaggtggagcctttaagaggtgattgggttatgaggtcgtgccattcatgtgttaatggataaataggttatcatgggagtgggactggtttggagcttgcagtgagctgagattgcaccactgcactccagcctgggcgacagagtgagactccatctcaaaaaaaaaaaataaataaaataaataaaataaaataaaaagaggaagaaaggccaggctcagtggctcatgcctgtaattccagcaccttgggaggccaaggcacgcagatcacctgaggtcaggagttcgagaccagcctggccaacatggagaaatcccatctctactaaaaatacaaaaattagccgggcatggtggcggatgcctgtaatcccatctacttgggaggctgaggcacgagaatcacttggacccagaaggcaaaggttgaggtggaggttacagtgagccaaagtcgtgccactgcactccagcctgggcaacagagcaggactccgtttcaaaaaaaaaaggaagagagacctgagcttgcacacagcctgctagccatgtgatgccctgtgctacctcaagactctgcagagtccccaccagcaagaaggcccttgattttggatatctcagcctccagaactgtaagaaataaatttctcttctttaaaaattgcccagtctcaggtgttcttttatagcgatgcaaaatggactaagacccaagtctattcataagagtggaattcttttgggggataacatttcacttaattggggctcccagttgtatttcctgtcgtcaattgatggtacatgttcacctttgaaaaaccttcctggctcacaaaaacaggcggccagttggatgtggtttatagatacggtcatgcacaactcagatctcagctctgctctcaggggactcagtctatggcggggaagagtcccaaaatcagtaaacaaatatatcatctcaaaggtgttattaagaagaggatgctgagactatgatacaagggagggtgaggcccaggctgatagggttgtcaggaaaggctctcgaggtgaggtctgcactatgatctgaacaaggggccagctctaaacaccctaaacaggcagagagaacagtgtgggatcatactgtttatttaaaaaatattttttattttttattttttttgagatggagtttcactcttgttgcccaggctggagtgcaatggcgtgatcgcggctcaccacagcctccgcctcccgggttcaagcaattctcctgcttcagcctctcgagtagctgggattacaggcatgcgacaccacacccggctagttttttatttttagtagagatggggtttctgcctgttggtcagactggcctcaaactcccaacctcaggtgatccacccgcctcagcttcccaaagtgctgggattacaggcatgagccaccgtgcctggccctaaattttttatatatttttttgagacggagtcctgtctgttgcccagcctagagtgctgtggttcaatctcggctcactgcaccttccgcctcccacactcaagtgattctcctgcctcagcctcctaagtagatgggattacaggcgcctgccatcacacccagctaatctttgtatttttagtaaaaacggggtttcaccatgttggccaggctggtcttgaactcctgacctcaactgatttgcctgccctggcttcctaaagtgcagggattacaggcatgagccaccgtgcccagcccatactatttgaagaacagtcagtaatccagagtgtgggcacttttcatgccaggtaaaatctacatgaagaagttttttttgttttttttgttttttttttttttgagacagagtcttgctctgtcacccaggctggagtgcagtggtgtgatctctgctcactgcaacttctgcctctggggttcaagcaattctgcctcagcctcccgagtagctgggactacaggtgcacaccacacccagctaatttttttttttttctgaggagtctcactctgttgcccagaccggagtccagtggtgcagtctctgctcactgcaagctccacctcccgggttcacaccattctcctgcctcagcctcccgagtagctgggactacaggcacccgccaccgcgcccggctaattttttgtatttttagtagagacggggtttcaccgtgttagccaggatggtctcaatctcctgacctcgtgatccgcccacctcggcctcccaaagtgctgggattacaggcgtgagccactgcgcccggcctacccccagctaatttttgtatttttagtagagatggtttcaccatgttggccaggctggtctaaaactcctgacctcaggtgatccacctgcctcggcctcccaaagtgctgggattacaggtgtgagccaccgtgcccggctacatcaaggagttttaacttgggatctccaatggatagatttcagagaaccatgaacaaaattggtagcaaaataaatgcctttttgagggttgaagatacacagcgtttacaggattcttaataggctcctcaatcagaacaggttaatgaatctgtattgtcatttttttttttttttagacagagtctcactctgttgcctaggctggagtgcagtagcatgatctcggctcactgcaacctccgcctcccaagttcaagagattctcctgcctcagcctcctgagtagctgggattataggcatgtgccatgacacccagctaatttttgtatttttagtagagacagggtttcaccatgctggccaggctggtcttgaactcctgacctcgtgatccacccgcctcggcctcctaaagtgttggcatgacagacgtgagctgctgcgcccgggcgatgttgtgatttttgaggctgcataggatgccatggtgtggactcaccacaatttactgaagtgagactctagtctcctggcttggttccatttttaggccactgttaaaagtgtcttaagtgtatatagggttgggcgtggaggttcacgcctgtaatcccaggacttttggaggccaaggcgggcagatcacttgaggccaggagttcgagaccagcctggccaacatggagaaatcccgtttctactaaaaaataaataattagccgggcgtggtggcacgtgcctgtaatcccagctactcgggaggctgaggcaggagactcacttgagtctggaggtggaggttgtagtaagccgagactgcaccactgtactctagcctgggcaacagagtgactctgtctcaaaaaaaaagtgtcttagtagatacaaaccttgtgtagagtcaaagggtgtgcaaattcaatactgagattgctcagctaccttctagaaagttagtacacccacggtcactactttcatacatttgtttcagattgtttaaaatgctgctgggtatggtggctcatgcctgtaatcccagcactttgggaggctgaggcaggcggctcacttaagtcaggatttcgagaccagcctggccaacatggtgaaaccccatctctactaaaaatacaaaaattagccgggcgtgggggcaggcacctttaattccagctaatcaggaggctgaggcaggataatcacttgaacctgggaggggaaggttgcagcaaaccgagattgcgccactgccctctagcctgggtgacagagcgagactctgtctcaaaacaaaaacagaaacaaaaaagccatgtatctgagattgaaaatataagcctcagagggacctctaccaagctcatttcaaagggtcaaatcagaatctactggtcagaagaaagcagtagaaagagctggtagactggctgctgcagatactctccagcaagtaaagtggacacctcgagtgagatgagccttgtgaagggactcacctaagcagcaacatggagggccaggtgcactgagggggttctgtggcccatatgtctgctagttgtgatttcttgagtctggaccccttaatcggaatggtctcattgtggtcagggtcagatggtaactaaagttttgtggggttttattgaagacagggtctcgctctgtcacccaggctggagtgtagcagtgcgatctcggctcactgcaacctctgcctcccacgttcaagcgattctcctgcctcagcctcccaagtagctgggattacaggagcgtgccaccacgcctggctagttttttgtatttttagtcgagatgggctttcactatgttggccaggctggttttgcactcctgacctcaggtgatctgcccaccttggcttcccaaaatattaggattacaggcgtaagccctgccacctccccctagtcccccatcccccgggtcttagcatttctaagtagctcccatgtgctacttagttacatacctgtcatttaggctgagtgctttgaaggtaggaggcttacatatctgtttcctgctgcttgacacagccagtgcttagtaaatcactaaacaaaaagattatgaatgaaaaggacatgggcaacagtttcagcagaaactcaaaccctttctgtctgaaagaaatcctttgctggggatggcttaagtaatggggaaaaatgggttctggagccagatttaagcagttatgtaatcccagatgagtgacttgaccccgttgggcctcattttcacctgaaaaacaaggctaataaaactcacaaaggtatcgtgtgtgaaaagctcaccactgagctgggcatgtagcaggtacacagtcttggctgtcaatactcaaaaatggcttcaggctgggcacggtggctcacacctgtaatcccaacactatgggagccaaggcaggtggatcacttgagcccaggagttccggaccagcctgggtaacacagagccccatctctaaaaatattttaaaaattagctgggtgtggtagtgtacacctggaccagctacttgggaggctgaggcaggggactggaatgtagggtttggtgctgcaggaagctgtggtcgtgccaccgcagtccagcttgggtaataaggtgagaccctgtctcttaaaccaaaaacataacaggccagatagcttgagccccagagtttgagactagcctgggcaacaaggtgaaactccatctttacaaaaaatacaaaaattagccaggtttggtggcacatgcctgtatcccagctacttgggaggctgaggcggaaggatcccttgagtctgggaggttgtggctgctgagagccgggattgcgccactgtactccagcctgggcgacagaatgagatcctgtctcaaaaaacatgaaacataccaaaaaaaaaaaaaaaagtttcataagcacagctgccacaatgttcctggacttcccatgttattccgttcaataaagtcacgtcattaatttagctgtgatcctattttcattgtatcatctaatcaattcacaaattgcacgtccttatttttggctcagaagaaaaaacaaaggttgcagtaaatccagacgtgacagccaagttggcttgctctttctcctccttccacattttgttgctgggcacactgaagacagggccactcaaaaagagaccctcgctgacaaatcgggaccaattttgattccctggaaaccatcatttatttttggtaaatgccagtgaggaatatacacgtcattcctgcagaaaagtctatagcatttaagtcttgaaaacaggtgacaattgaaaaacattataatattttcaggtcttttaataattcaatgctctgtgtccttcaggctgtgagaccctaaggtattggggtctggtaatgtcccagctatagcaaagggcctgttgggtgacataggacaaatatacagcaaaattcagaaactgcaagtgcttcctcacttgaacggatctggcccctttgtggtaggggcttgactgttcctagaatgaatgacttaaaataaggtggttaaaaattctgcagtgagtctcgccatggtgaacaaacatgattcagaaatgcctccttctataaaatgaaggagctgggttggagtcagtattaccagccagaccataccctgatgggtaaaggaaattctctaccacagagctcagcagtgaggtggctgagaggaaggcaggcctgcagatgaaagcgtgggagtggagcatgtggggcgggcactgtccggctgggaaaacccagccttcaagaggccattgtcaatcaggctgggcacggtggctcatgcctgtcatcctagcactttgggaggccaaggtgggcggatcatttgaggccaggagttcgagaccagcctggccaacatggtgaaaccctgtctctactaaaaacacaaaaaattagccagccgtggtggtgcatgcctgtaatcccagctactcgggaggctgaggcacgagaatcacctgaacccgggggatggaggttgtagtgagctgagactgcgccactgcactccagcctgagcaacaaagcaagactccatcttggcagggggcggggggatgtggaccttcaagtctcagaaatatgtgtttgtcttttgatctgctgatttggtgtaacgtgattgcctcattcattccagtgtacgtacttgctgtaaatttatatacagaattaaatagcccatttattaatttataaaccataataaaaccagacagtcatttcccgtcaccagcagatcttgcattggaaaaggaaaataatatacaaatttcagcaacttcagagatttcaggaagcctgaatggaggtcgaattcattttggagttcaataatatgttcaaagaatcaggtactatatataatcatatagacaactcccgtaatatctccgcagtgcaaaattatccctgtttcttgtcattcaccagtgagaaaaatccaactgcagacttgactgccttcggtgaaggcacacggcaagttcttctgacaaataacaccctttgggattgactcttcacgttttacacagcaattgtctcagcttgggaccaaagtatttacaaagcaagcgaacaagagacgaagcaagagggacacttctgaggccggtggtgcggaaactcaccgccaaacagggtggggggccagtcacctcttcaggagtgtcccatgtgtcagctgacataacatcttaaatacagaattccaattgaaagaaaaacaaacaacaacaaaagaaacaccagtcaagcataagtgatgttacttcctctctgaacagggaaacatctcgctcgctgggagataaaaggtaaatctctcatttgctgctctcttcccctaagtgccagcaagaagctgggtgtggtgatgaagaaagaaggcagccatcacctaagaccccacaagccaagccgtggtcccctccgtgagggcacggtcctttcatgaagccgtaaaagagaccacagctcggacctgagcactcagggttacctactggggtcttgtcatattccttatgttgatttctgccaagacccaaactgattccttttttttttttttttttttgagacagagtctcactctgtcaccaaggctggagtgcagtggtgtgatctcagctcgctgaaacctccacctcctgggctcaagtgattctcctgcctcagcctcccaagtagctgggattacaggcaggtgccaccatgcctggctaatttttgttttagtagagatggggtttcaccatgttggccagggtggtctcaaactccagtgatccacccacctcagcctcccaaagtgctgagattacaggcatgagccaccacgcctggccccaaactgactcttgaccaaagaatctgatttggcaaaccaaatcttagtgcagtgttcgctcctcgtccccttacccagaacatgattcagatcctaacataaacacaaaaacaggtcagggaaccaaaacactgtggtcttgtctattatacaaaatattgagataatgttcacgattcattctgttttcagcaattgtgacaattttgaagcttctctcgaagcttcgaaacacttcatttcctactaaataccaaaacgtgtcagacaggcatcaccagtgggaacttggttttgttttgtttttttttttgagatggagtctcgctctgttacccaggctggagtgcacaatctcggctcaccacaacttctgcctcccaggttcaagcaattcgcctgcctcagcagcctgaggagctgggactacaggcacgcgacaccatgcccggctaatttctgtatttttagtagagatggggtttcactatgttggccaggctggtctcgaactcctgacctcgtgatccgcccatcttggcctcccaaagtgctgggattacaggtgtgagccactgtgcctggccggggaactttgtttttaaacgtttacaaacaaaaagattttcgatgcataggccagtcctaatgcatcccataatggggaccaaggcaaaaacacacacacacaactacaaaatattccctagaaaaatgcaagatcctccgaaaatcaagatctctctaccaaacaacataccaagtcatcacagaagaggtgaagatgcctctcaaaagacatgtgccacagaaatagagcttgaaatactgaacacgatttctcgaagatccttctcaccaccccaagagaagcgccctgctctggtgagggaagaggaggcaaaggagaagagagaagtttcccttccatctggatctgggtggatgccaaccctgacgtgcagggcagagcaccaggctgcaggaactggatgctaattgcaatcgctttttgctttggaacatttgccaggaacttgtgaactgctaaggggatgaccaggaaactggatccatctctgtggctggggatgttttgaatgattctcgcgggctccctgtctgcttggtgaccctgttggtcctatgcgtatctgcgccagggaattaaactagccagtctgacgttctcaagcaccgccctggacacccccactgccagttcatggtctacagccacagtgaccccagcttttcacacaggtcctgaatgttatctggaatgcagacacaagtgctctgagctacactgcttggggaataattccacatggaaaggtacaacgtggccaagatctccgcagggacacggccctcagatgacagactccaggaagaaagagcatgagacactggtctctgtttaggtttgcccagagctcacggccgtctgcactgcaggcaacgcatcctcctgcggctcacggggggccaggaaccccagggcttctgatggagagttatgcaccgtcccctcggctgggttgtacattcactgattgtcagaagtttctgatactgctgtgggggccggggaaggagtcaccaacagtctggtcctgtcctttggactctacacatcatagcggttcaaactgtacgagtttgggtagctctgccggctgtattggaagtggtctgttaagatgttgttgcggccgtactgatagtccccgtgctgggggaagaggaggccgttgtggggcttctccagtgggctccggtgacgctccttgctgctcaggtctgctgtggtgacggggaggaggtgcttcctggcttgctggtttgcatcgtacttggtctgtgccagaaagagagcaatgagacaggacatgcccggggcataagagctcgtaattcaaagtcaatcaactggctggctgcggtggctcacacctgtaatcccagcactttgggaggtcgaggcgggaggatcacctgagctcaggagtttgagaccagcctgggcaacatggcaaaaccccgtctctactaaaaatacaaaaaattaaccgggtgtggtggcgcatgctgtagttccagctactcaggcgttctgaggcacaagaatcacttgaacccaggaggcggaggttgcagtgagctgggaccataccactgcactccagcctgggagacagagcaagacgctgtctcagaaaaaaaaaaaaaaaaaaaaaaagtcagttaacctccggggccggcataagtcatagggcttgagcaaggaaagcagacttgaatggaccagaccacagtgcatggacagactcagaagacaagtccttggccaggcgcagtggcttatgcctgtagttcaagtgctttgggaggcctaggcgggaggatcacttgaggctaggagttggagaccagactggacaaaatagagagaccccatatctacatgtgttaagaaacaaatgaagaggccaggtgtggtggctcatgcctgtaatccctacactttgggaggccaaggcaggtggatcaactgaggtcaggagttggaggctggcctggccaagatggtgaaaccccatctctactaaaaatacaaaaattagccaggtgtggtaggcgcctgtagtcccagctactcgggaggctgaggcaggagaatcgcttgaccccgggaggcggaggttgcagtaagctgggatggagcgccactgcaatccagcctgggtgacagagccagactccatctcgaaaaaaaaaaaaaaaaaaaagaaaaggaaaagaaggcaagccctccctgttggccatcccatgtccttacaccgcactaaacagagcctttgagaggagggagggaaaaccccagctgagacacagccggaatgatttgaggacctgaggttgcctatgcaggaaaaaggaagccagagtgggatggggctacgccaagatcataaaccagtcagtggcaaagctctgacatacaaccccagccttgagcgcccgggaggcccttccttttctgacttcctgggtgttggggggccggcttccttccctgcccagcctctcagactctcaccttgttatagaggaagacccccaggatggcggtcatcatgcccaggacgttggtgctggtgactgggttgcgcagcatgatcagggacaccgtgatgaccatgattcttttggtggcattggcgaccgagtagctcagggggctaacgaggttgaggatgctgaaggcgataacattctgggcaaagttacagaagccgctgacagccaggagcaggagcgtccagggccactggtagacgtaggtctgcagagaccggaaggtaaagacagcacttcagtgggcagcggtgaccctgcctccctgtatccacctggcagggttaggggaagggatgtggaggggctcatctggagcctcatggtccacaggcagccagtccagatgtgtcaccaagagacactaggtgctttaggtccatgacctcagaacctcatgacaccacacagcatgggaatcacccgccgtctcctgccaaggaaacaggtgaagccaggtccccaaagggcaccaagcaagacgtaagccaaagccttccctggcagtgaacagccaggaaccctgggtttggcaaagcagggatctgcttgttggacgcaatgcattctacagggttggaggtcctgggaaggtggctctgagcctgcgaagtacctggtaatacgaaagccacgggtctgcacctattgctgcgaggatgaacagaatcatggcttttgaagtgctttacaacaatctcaagccaaacaaacacaagaggtgacgttaccatcaacagctgaggccaggtgcagtggctcacacctgtaatcccagcactttgggaggccgatgcagctggatcatctgaggtcaggagttcaagaccagcctgaccaacatggtaaaactgtgtctctattaaaaatacaaaattggtcgggtgtggtgtggtgtggtggcgcatgcctgtaatcccagctgaggcaggacaatctcttgaacctgggaggtggaggttgcagtgagctgagattgcaccactgcactccagccagggcaacagagcgagactctgtctcaaaaaaacaaacaaaaaaaccagtttaggttgggcgtggtggctcatgcctgtaatcccagcactctgggaggctaaggaaaaaaaatcattcgagggcagcctgggcaacacagtgagaccctgtctctacaaaaaaaaaaaaaaattagccaggcatggtggtgcacacctgtggtcccagctacctgggaggctgaggtgggaggatcgcttgagcctaggagttcaaggctacagtgagctacgatggcgccatagcaccccagcctgggcgacagtgtaagacactgtttcaaaaaaaccccacaaaactttaccatctgaccctgaccagaatgaggccattctgactaagggatccagaaattaagaaatcacaactagcagacatcgggaccatggaatcccccaaagagcctaggctggtcccaggacaggcagacaggtgagaaccaggtagacactgccctgtaggccaatttccaggccacgctgaccttggccacaggaggacagagctggctcagcccagggtgaccgtgattggcggccctgctggagctgcaggatgtctacctgactccatctccactgcactccaagagagaaggatcacacggtcctctcaaatgcaagaagacacgcttaggcgaccagctcaatgtcaaccaactcaagactggaactcccaaatgcaaatccatttacctgtgccatacaccctgcagcttctgcggggaacctcactggaggaatagcccctgtaatatatatgagcccaccaggatgccttcatgttgggccagcctgttctcccaggggtcgctccctaaggtgatcggttaggatttccatgctattttcttcctgcttgcatagatatctatcttctgggaagggaacccaaccaatctggtttaaaacaaaaaaaaagatacataataaaatggactgatttggcagcacggtgcacaattccaggcatttttttttttttgagacagagttttgctctgtcgcccaggctggagtgcagtggcgcgatctctgctcactgcaagctccgcctcctgggttcacgccattctcctgcctcagcctcccgagtagccgggactacaggcgcccgccaccgcgcccggctaattttttgtatttttagtagagacggggtttcaccgtgttagccaggatggtctcgatctcctgacctcgtgatccacctgcctcggcctcccaaagtgctgggattactggcatgagccaccacgcctggccaattccaggcattttaacaaatgcatcaattcatggaaccaccatgaccatcagggattaggacactcctggggggcttctcttttgtcctaaccccctcctcctaaacctggcaaccatccatgttttctgtcatgatccgtgtgtccttgggagactgtcatggagctggaatcacatggctgggaacctttggagacaggctgctttcactcagtgtggcaactctgccattcatccatgttgtgagggacaagagttggtaccttttcattgctgagtaatgctccactgtgtgtaacattccatgtactgaagttttttgttttgttttgttttgagacggagtcttgctctgtcacctaggctgcagtgcagtggtgggatctctgcttacagtaagctccgcctcctgggttcacgccattctcctgcctcagcctcccgcatagctgggactacaggcgcccgccaccatgcccggctaattgttgtatttttagtagagacagggtttcatcgtgttagccaggatggtgaagttttttttttgtttttgtttttttttgagatagagttttgctcttgtcaccctggctggagtgcaatggtgcgatctcagctcactgcaacctctgcctcccgggttcaagtgattctcctgtttcagcctcccgagtagctgggattacaggcaaccaccaccatgcccagctaatttttgtatttttagtagagatggggtttcaccatgttggccaggctggtctcgaactcctgacctcaggtgatccgcccaccttggcctcccaaagtgctgggactacaggtgtgagccaccacacccggcctattttttcttgagacggagtctcactctgtcacccaggttggagtgcagtggcacgatcttggctcactgcaacctctgcctcccaggttcaagcaattcacctgcctcagcctgccaagtagctgggactacaggtgtgccgcaccacacctggctaatttttctatttttagtagaggaggagtttcactatattgggcaggctggtctcgaactcctgacctcaagtgatccacctggctcggccttccaaagtgctgggattggattatatgcatgaaccactgcacccagccatctgtccattgtcttctgatctaatttctctctgttgtttaaactggataatgtagactgatttatcttcaagttattggctccttcctctgttacctccattccgcttttcagtccatcccttgagttttttttttttttttttgagatggactctcgctctgtcgcccaggctggagtgcaacagcatggtcttggctcactgcaacctccgcctcccacgttcaagcagttctcctgcctcagccttctgagtagctgggattacaggcacgtgccaccacgcccagctaatttttgtatttttagtagagacggggtttctccatgttggtcaggctggtcttgaactcctgaccttgtgatccatctgccttggcctcccaaagttctgggattacaggcatgagccaccacgcccagccaatcccgtgagtttttaagttactatcttccatttaaaaatttctggcctccagcctggccaacatggtgaaaccccatctctactaaaaatataaaaattagccaggcatggtggcaggcgcctgtaatcccagttgctcgggaggctgaggtaggagaatcacttgagcctgggaggcagaggttgcagtgagccgagatcccgccactgcactccagcctgggtgacagagcaagactccgtctaagggaaaaaaaagaaaatttctagccaagtttggtggctcatgtctatagtcccagcactttgggaggctgaggcgggtggatcacttaagcccagaagtttgagaccagactgggcaatatggcaaaaccttctttctacaaaaaatacacacacacacacacacacacacacacacacacacagagttaaccagatatgctggtgtgaacgtgtagtcccagctactcaagaggttgaggtgggaggatcactgagcccagagaggttgaggtggcagtgagctgtgattgtaccactgcactccagcctgagcacagaatgagaccctctctcaaaggaatttaaaaaatttccatttggttcttcactctatcttctatctgttcacatttgtctccagagtctttactttgctccttggagcacgatggtaatcactgctttaaagtctgtctgataatcccaacatctgtatcattgcactgttggcccttgttgattgtcttttcccaaccacctggaatttcctgggtcttcgtaaactacgtaattttggctggaatcccgggcatttcgcatattataaaagtctgggtcttatttaaatcctatgaagaatgttgatgttttgttttagcaggcaattgatgatgctgggttcaggctgcaggcttgaccagccttctgtgggttgtggttccaatgtcagttatgttttcaaagcctttccagtggtatttggctctgtcctgagtctgtgccgcctgtggtcagtctgaaagccaagcggtggtctctcccacagttctgttcttagtctttggtatgctgtttaagatctcatcctcacatgtgtgacgctcaggggcgagcctgggattccatgggcgactttatgaggtcgctgtcctcagctcctccctccacacaatctcctgagtactttctagtttcctagtccctccctttcatggccctccagtcagaaagctgaggtttaatcaccgtactctgctgttcacttcctgtgattacacccccatttgagggtcaagcagtgacagtacagagaacaagctgcaaaagggctcatcccatcctctgaggactatatgtcctcaaacagcagaggaagagtcgcccttctcagggttttaggtggctgtggaacctgctgctgctgccaccaacgtaggattgtcaggagcctgggaagcaagagatgaaggcaaaaaagaaaatagaaaaaaacctaacagacagccgggcgtgccggctggcgcctgtaatcccggcactttgggaggctgaggcagggagatgatctgaggtcaggagttcgagaccagcctggccaacatggtgaaaccccgtctctactaaaaacacaaaaattagccaggagtggtggtgcgcgcctacaattccagctactcaggaagctgaggtgggagaatcacttgaacctgggaggtggaggttagagtaagctaagatcgtgccactgcactccagtctgggtgacagagtgagactccatctcaaaaacaaaaaaaaaaaaccaaaaaaaaaaaaaaaaaaagagaaaaagcctaacaggcatccaggtgtggtggctcacgcctgtaatcctatctctttgggaggtcgaggcaggcagatcacctgaggtcgggagttcaagaccagcctggccaacatggtgaaacccatctctactaaaaaaaaaaaaagaatacataaaaattagctgggcatgatggcatgtgcctgtaatcccagctatatgggaggctggggcaggacaatctcttgaaccctggaggcagaggttgcagcgagctgagatcacgccactgcgctccagcctgggcaacagatcaagactccatctcaaaaaaaaaaaaaaaaaaaaaaaaaaaaaagaaagaaaagaaaagagaaagcctaacaggggatttcctccattctctctgagggttaggagtctcctttcccattctccagactccaagcagagaacatctctgttctcattcagtgcccacatctaccttctgagctgcctcatgtccaggctgaagacacaggaggaagaagaatgacgaactcactggtggctccaaggcactctgaattctggtctttcctccgcccatctgcctgctaccatttatttctcggttctcaagtagctgcttcatgcattctgtccaagttttgaaaccaggccacctgctccagagtctaggaatccccgcctgtcttttgccaagccatttggcaactgggccaggcgtctctgggaactgcccactgcagcctttgattcttggtagactggagagcagcagacaccagctgacattctcccatctcatcctcttcccgcctgttctggagaacaggactgcgacggtgctaactaacctgctgtctgtgtagtctatgtgggagacacaagacaaagagggggaacccagacatgtgggaaccccatcttcagactgcaacattagtgaatatggtgtatgcctagggctgctattaaaatacacaaagtcatgctcatgttaaaaaacatatgggccaagtgtggtggctcacagctgtaatcccagcactttgagaggccaaggcgggaggatggcttaaggccaggagttcaagaccaacctaggcaacagtgggagacagtctctacgaaaaaaaagaaccaaccaaacaaaacaccaccaaacataacatacatagcctcaactaaaaaaaaaaggttacttaaggtattacaacaacaaaaaagataatgactagaacaacaataacaacacaaaatgtcctaagtgcaagaaaagcaaagacaaaaaaacacagcaaaagcctgtatgtttctgtccatgtgtggacacatacatactctaatgagctgtaacacagaacagcagaggaactgacaggaaacccactgacactattacacagccgtacaagaaatgagaaaggccttctatgtcgttatgaagagctctctgggacgatgagatgaaatgaacaaggtgcagaatagttcagctccccttcagtatccacggaggactggttctagggacccctgcggatgccaaaatctacagatattcaagtcccttttataaaatggtttagtatttgcatgtaatccatgcacatcctcccatatacttgaaatcatcgctagattacttgtaatccctaatacaataaaactgctatacaaataattgttatactgtattattttaaaatgtcttattctttattatagtattttgtttttctaccatatattttcaattcgcagttggctgaatccactagtgtggaacccacagatatggaaggatgactgtatgtttatatttatttttgagatagggtcttgctctgtcatgctggctggggtgcagtggctcaaacatggctcactgcagctttgaccttcccgggctcaagtgatcttcccacctcaggctcccaagtagctcggactacaggcatgtgccaccatgccgggttaatttttggttttgttttacgtagagacggggtttcaccatgttgaccaggctggtctcaaactcctgaggctaaagcagtctgcctgcctctgccttccaaaatactgggattacatgtgtgaggcactgtgcctgacctgtaaatttaaaaagctactttttgggctgggcgtggtcgcttacgcctataattccagcactttgggaggccgaagtgggtggatcacctaatgtcaggagtttgagactagcctggccaaaatggagaaaccccacctctagtaaaaacacacaaaaaattagctgggcgcggtggtgggtgtctgtagtcccagctactcgggaggctgaggcaggagaactgcttgaatccgggaggcggaggctgcagtgagccgagaacatgccattgcattctagcctaggagacagaaaaactccgtctcaaaaaataaaataaaataaaataaaataataaaataaaaagctactctgtgtgtaataaggacagagggtgattatacatgcaaatttgcttatatttgcaaaaatatggaacaggtgaactaggagcctaagaaatgttatccatggtcagggaggggacagggagagtacaggaatcatgaccagacttcttctttttttttatttttatgagacagtctcactttgtcacccaggttggagtgcagtgtcgtgatctcagctcactgcaacctccacctacctagtagctaggattataggcgtacgccaccacaccagataatttttatattttttctagagatggggtttccccacgttggccaggctggtttcgaactcctggcctcaagggatccacctacctcggtctcctaaagtgctgggattccaggtgtgagccaccacacccagcctgcaaagaaatactaaccttttctcagcactccagttgcaattgtgctgtgagaatgctcattctgaagcaattatatgagtgagtgtacagtagaataacatcagtgaataacgggtagaataagcaactaagaaacgaggagcggaaccaagcataccagcgacgagatctaaatatgaaattcaaaacagcaaagatctggactgttcaactgaaagtgacgctaattgctaggaactctttgctgctgccccaagtgtgtacttcctaatttttcacagtaaaggcctaacaacaatgaccacccagcagcaaaaagcacccatggcacctggattgtgtctctaaataccgctccccactaacggcacctggagtcctgaaggaggggctgactgcagctctgggatgggaagtacacaaggtgaaggcgggcatcccgctgggagaaacgctgacccacagtgctagaagggcaaggagccaatcagaagggctccaatggctaagacaggacaatttttttttcttctttttttttaagatggagtctcgctctgtcgcccaggctggagtgcagtggtacgatctcagctcaccgcaacctccgccttccaggttcaagcaattctcctgcctcagcctcctgagtagctgggattacaggcgtgcaccaccatgcctggcaaatttttgtattttctgtagagatggggtttcaccacgttggccaggctggtcttgaactcctgacctcaagtgatctgcccacctcggcctcccaaagtgctgggattacaggctggagccactgcgcctggccaagacaggacaatttgactaggaaaacgaataattcatgcaactgacaaacacataaaagttcacaatgatgctggagaaaaaaagagaaccccttccctacccccaaacaaaccctcaactctggtcaacatttggagtaagctccaactctctatcctgaaaattagtcatcaaaaggaacagttaagcattaaactgcctttctcgtaccatacttcaaggtaacaaactagtcctggaagatggaaagttcttcacagaagaattacagctcatcaatgtgaaacgaaagttagaaaagtgagccatggtttactgattgggaaaatagaggtaatatccactacttcagcaggtggagccaaggattaaagataagaaatgtcacaaatccagctagaccacattaagacctcaataaatatttacttttcctttctaactcgagtctggaagaatcgcactggcctcctcctcaccgcaggcacttgcattcatttataacacattctctgaaggcagaccctgcaggtggcaaaaagattcgacgtggagtaaatggaaacagagaccagggaggaactgagctgcacagttttctttctttcttttttttttttgagacggagcttcacacttgttgcccaggctggagtgcagtggtgcgatctcggctcactgcaaactctgcctcctgggttcaagcgattctcccacctcagcctcccaagtggctgggattacaggcgtgcaccaccacgcctggctaattttgtatttttagtagagacaggatttcaccatattggtcaggctggtctcgaactcctgacctcaaatgattcacacaccttggcctcccaaagtgctgggattataggcgtaagccaccacacccaggcagcgcatgtttttttcttttttttttgacacggagtctccctctgtcacccaggctggagtgcagtggcaccatctcggctcactgcaaccgccacatcctgggttcaagcaattcttctgcctcagcctcccaagtagctgggactacaggtgcgagccaccatgcctggctaatttttgtatttttgggagaaacagggtgtcaccatattggccaggctggtctcaaactcctgacctcgtgatccgcccgccttggcctcccagagtgctgggattacaggcgtgagccactgcgcccggctttttttttttttttttttttttttggccagtgcatagttttcaaagttccagggctggcaaggcacagtggctcacatctgtaatcccagcactttgggaggccaaggcagatctcttaacgccaggagttcaggaccagcctgggcaacatagtgagaccctgtctctccaaaaacagtaaaaaaacaaaaatcaaacaaaaaaaaattagccaggcatggtggtattcgcctgcagtcccagttactcgggaggctgtgggaggatcgcttgagccccggattgaggtcaaggctgcagtgagccatgattgtgccactgcactccagccctggcaacagagcgaggttctgtctctaaaaaataaacatttaaaataaaaaatgagtaaaaataaaaagtcaatgtgctatctggactatactgtcaggaggtgaaagagtcaccttctcttccttgacgctactggcgcacacacagcagctatcagcacctgggatcaagcacaccagagaaggaaatacacaggaaacccacttcctcgatggcgtgcatcgtcaccgtgaggcattacagaggactgactgctgaaagcgctggctgtcaggtgcccaaaagataccacaatgttaacatgcagctacagctcctcaacaaagcacctattctggaactagccaagaaaatggcgtgttcttggtgctgtacaactcaccaagtcgctgctgaccaggaaagccgagaggtccaccagaacccaggtggggatcataaagaagacggcgtggcagcccaggatgttgagcagccggagatggtggatccgtgaatctcgcaagacctggaaagggaaagcctctttagagggtgattaaaactatatgtggcaaaaagggctccagtgactcaggccccaaacacagtgactggacattaaccctgacatctgagcttggacaccaaacctgcaagtgcatttgtgaggacatacacagcacaggcctgaaacaagcaccatgctccacgcataaacgactgagaaaagaaaacaaaaataaaacagtaacactcagtgctggtgaggatgaagtgaagtaggcactctgaaattccactggtttgaggctgaattggtataacctttctaaaatacgaccagacaaaccatattaagagtgattaacgtttcataccctctaacctgagaactgtaagcctatcataatgaaataactgagacaggaaaacatcacacacgtgattgtttctacattacaatgaaaagttggaaataagtggtatttccaatagagagactgcattaactgtggtacctgaaaagtgtgtgattatcacaggagttaagagcaatttttttttttgagacggggtctcactctattcctattgcctaggctggtctcgaactcctagcctcaagtgatcctcctgccttggcctcccaaagtgctgggattatagatgtgagccactgcactaggcttcaacaagttttaaaatcttgttttaaattgaagtttttagctaggcctggtggctaatgcctgtaatcccagtgctttatgaggctgaggtgtgaggatcacttgagcttcgaagactgaggctgcagtaagctatgattgtgccactgcactccagcctgggcgacagtgagccttggtctcaataaaagagcttttctttatttttttcttattgagcacattaactttataatagaaaaacttttttttgtttttgagatggagactcactcttgcccaggttggagtgcagtgatgcaaaatctcagctcactgcaagccccgcttcctgggttcaagcaattcttgtgcctcagtgtctggagtagctgggattacagatgcgtgcctggctaatttttatgtttttagtagagatggggttttgccatattggtcaggctggtgttgaactcctggcctcaagtgaaccgcccgccttggcctcccaaagtgctgggattataggcatgagccactgcgcccggccagaaaaacaaactatttaaaaagcaaaatgacaaacagaaaatcagcagaatggcaatcaagatttttctgctctaatagcaaagaaatttctactccgcctgttttcccaatgccaccagtttgctgcccgcacacccctgaaaccccatgcatgtccgctgatggtgaccaaatacctttttggagaaaatgttctgaagcgagaagcacagcgtggcggcgagggcgctgacgagtccccacatgtcaaaagacaactcggtgacggtggccagcaggacaccgctgatgatggggatgagtgacaagtatacctgcaggaagaggtcatcaagaagggctcacaggccagactagagctgggccacatgccacagatgcccagggaagagcccctctcctccctcagcaaagggataccacctaacactttgaaagtggtgtttgctgtgccagtgacgctctggtgggtggctgggggcaggtggttatcagagcgccaggggcagggcttatttgtgggtagccccatccccataccgtcacccccattaagagcctctgctcagggccacagcccggggctggtcctaactccacagatctgttcagctgccactgacgcaccagggtttgaagccctgatcctctataaggctcccccattccctctttttaaaaaatagtttttttgagacaaagtctcgctctgtcgcccaggctggagtgtagtggcacaatcgtggctcactgcaacctctgcttcccgggttcaagcgattctcctgcctcagactccccagtagctgggattacagggatgtgccaccacgcccggccaatttttttgtacttttagtagagacaggatttcgccatgttagccaggctagtcttgaacgcctgatccacgtcatccatccaccttggcctcccaaagtactgggattacaggtgtgagccactgtgcccagcccccattccctcttacttcaggctcttccagtatggttactcctggctggcacactccactgatgccttctcctcccagtgacctcctgcctccacaaggagtgctttctccaacccacctccaccttgggaggctcctgtgctgtgctcccagggccactgcctggacttccccagcagagagctctccactcactctttttttttttttttgagacggagtctcgctctgtcaccaggatggaatgcagtggcatgatctcggctcactgcaacctctgcctcccaggttcaaccgattcttctgcctcagctttctgagtagctgggactacaggtgcctaccaccacgcccaactaatttttgtatttttagtaaagatggggttttgccatgttggccaggatggtctcgatctcttgacctcgtgatctgcccaccttggcctcccaaagtgctgggattacaagcgtgggccaccgtgcccagcctctccacccactctgtctgttacatcatccggtcccgttagtgtaccttagagcaggtccttgttcactgctttatcctggtgcctagcactcagtaggcactcaatagctgctagctgaatgaacgagtagcaaacatagtgacagagagccttctagaaggtctggcatgcagggctaaacaactcccaacttccaggatccaccaggatccattcccgcgtgtccagctcttctgactctcggctcaatcctgtcctacaaagaacactcttcactttgggaggctgaggagggcagatcacttgaagtcaggagtttgagaccagcctggccaacatggtaaaaccctgtctgtattgaaaatacaaaaattagccaggagtgatggaacgcgcctgcaatcccggctactcgggaggctgaggcaagaatcgcttgaacccaggaggcggagcttgcagtaagctgagatcgcaccacggcactccaatctgggcaacagagggagactccgtctcagaaaaacaaacactcttaaggagagataggagaggtggagattttaggagggagtggtcatgccacaaggagggcagaccgagggctgtggacctgaattccagcttcccgaatatcaggctgtggccctcaggcacatgattctcccctctcagtccatctcaggaaaacctgagatcaggaatgatgactactggccttatctgccttgcagggcaggttcctagaagttatgatgtcattataattagtctggctgcctaaccgggccaattcccagtctttcctcactgtgtgaagttccggctccttgcccaagctgggtacaatgtcccgtacaacggggaaacctgatacacacgatgatatccggtgatgcagctacacacctcagggacaactctgacttctcaggagccaagtcacagcctgacatcaccctgggggagcagggctacagagcacacacaggtcttgctgagacaaagacaggcaggaataaaaaaaaatcagccataggtggcccaatttctataagccgatccagggcactacctctctgagttacataaaatacaacatgccagaaaccaaccacttggaaaagaggcacggtgtccagcatcagcatgaaatggattccggctgagacaacaagcgcccaacttccacttaagaatacgggataaagctgtctccggctaaagccatggctattcttgccccaagccaggaaataccctggcttggcatcttgaacagaatttggactgtgcccaaagcatcctccttatgcagccctgagtcctgtgtgccactttcgcttccgttcccagaccatcacaacttctggctgttttaatttctaagactttgctggattttgccaagatcgaactccttggatcgcgtctggcttctgatcccagaggtcccctgacagaaatctcttgtcaagaagtgaaaacctagccaagtgcagtggctgacgcctgtaataccagcactttgggaggctgaggcggacggatcacttgaggtcaggagtttgagaccagcctggcaacatggtgaaaccctgtctctattaaaaatacaaaaaaattagccaggtgtggtagtgcacgtctgtagtcccaactacttgagaggctgaggcaggagaactgcttgaacctgggaggcggaggttgcagtgagctgagattgtgtcactggacttcaggctgggcaagagtaaaactccgtctcaaaaaaaaaaaaaaaaaagtgaacacctaaccgacagcgttctgatccatccatccctagtcccactggaaaggccacacatggggtgtatggccaagatgtgaccaacccatcacctaccagcaaacccaggtagggaatcaaaacggggaggaaaattggatctgaaagggacaacagtgttcctaagaccacacagcagagatcacagagggacacatactccacacaccactgctcacagggtgattctagaacttgagtagtaaaaggccactggagacctctacactgacttccctatttgacgggaagccaggcagcctgcagaccaggatcctgaccacgtcaccagttggcaacagggaggaaccccctggagctcccatctgcccagagtccctgcccggggttaccttggtgctctgcttctccttcataatgatccgggacaggaggaccacccagatgggcatggtggccttgactgcaaagagagggatgggcactcagggggctgcctgaatttcagggcccaacctgttccacctccacggcgggatgggagggcctggcagcccctcacacctcttcgccccttctctttcggtagggcttcctcctgccacggctgttgtggtctgtcctgcttacctctcagctctcttctcagctcctcttctccctgagaaccccgtgcgtgtccctcccctaccaaacccttggcagcccctctgctgacttctcagtccggcgggacgcgccccgggcggcgcactcctatccatgcgcccaaacccgaagcggcgggcccggccgccgcccccgaggccgggcgcggaacctaccggtgtgtgcataggacacgggcaccttccagatgctgacgtgcgctgacacggacgcgaagtacttgccgaaggcgagcggtagcacgtagcgcgggtagaagcgcggcggcagcagcgggccggacgacggatgcggactgggtccggggcccgagacgggcggcgcggggggcacgcgccaggcgcgcagcagcggcgggagcccagcgcacagagccaggatgtggcacagcgacacggtcaccgggaacgggaaggcgctcaggatcaccttgttgaccacgttgccgcccgcgctcagcgcgtaccacagcaggcacagcgccgccacccgcgcgccctcgcgcgccccaccactgctgctcgctgcgcccgggccccccgcgccgtggcccgcgcccaccgcggccgccgccatcctgcccgagcggccgccccttccagcccgtccgacggcccgacgccgggcgggggcggggctgggcgggggggcaggcgccccggtctacgccgtttcccattggtcgctgcctcctcgcgtcatccctccgcgccggccgacgcgccagccaccacgtctcgagtgcaggcccagtccactgtagatgcgcttccggcggagccgaggccggaagcggaagaaggggacacagacctgcgtccaagctgtgccacctgagacgtgggcggtcccagtgaccgggagccggagctcgaacgggacgggcgaacagaagcgcggagggcttcgcagcgtcggcgtctgtgcgtgggccaaacatcagggcctcgaccagggatacaagggcaaccgctaactagattcctgattcctgatggctggcggcggctgacaccaaaggtaaaaggccttttagggaaagaaaccatttgtgaaaagctcttgggctaaactcgctctgcaaactgggggcgcacgctcgtggccaaactctggcagtgggactatcccggagcacccgatccctggaatcatgttctggaaaccaccgcgacgtgcgcagttctcgggcgtggccctggtatcatcccactgaatcctaggaacgcggtgcggtaggtatcactgtccgcatttcacagaccgaagtccagaatggggaagcgacttgtcttaggcttcctggccacactggggaccgtggtcatggtagcgtccttggacacctgtctccaaggctctgcagaagggggaggtgccgggccctgacggctgatgtccaaggaccagccgggatggaccagccccaggaggccccagtggaggaaaacaggacgaggttttcagtaagatgatcttatactaattcaagggctataatttgttctccacatcgtgtgcctccaactttttcggggaaagggtgttaaaattccgttacagtgtttttacttgtcaaattagaagcagcaaccggctgggtgcagtgagtcaagcttggaatcccagcactttgggaggccaaggtgggcggattgcttgagctcaggagttggagatcgtggcatcgataacatggcagaacctcatctttgcaaaaaatacaaaaattagccaggcgtggtggcgcacgcctgtggtacccactactagggagactgaggtgggtggatcggcttgagcccaggtcaaggttccagtgagctatgatggcgccactgcactgcagcctgggtgacagagcgagacccagtctcaaagaaaagtagaaagcagcaacccaacttggctccccaaatgttggaaggtatcttagcttatccttgcattctcaaaggccctaggcccttctggatacatggacacaggcatggtagtccctgcaggcaggggtagtggggagctgcaacctatcccaaaactctagagatgctgataggaggccaagctctgcaccctaatatcctccagctgtaccctctgtggatcagagtaaagtcacatccttgggacaccatgtctcagcagagctgttaaacataggcacagtgaaattaggaaagtataactataggcaccctacagcacagctgagtgtcagatacttccactgacacactgacatgctttgtgttttagttctcacaactctggggtattctcaccccccaaatggggacatgtgcacaggagtgaagagatgagctcagagccacacagctggtgggtggtaggcctgggttcaacctcatcctgccttcaaagccactttgcccatggccttttgttggggaggggagtgtgttctgcaccaagcttttgccaggaatccctgctagctctcaaactggctctggactgactgtagtcttacaggctggaaggaacctttggtttgccctgtgagactgcatgtcttaaggtgtagctgtttcttcatttgtgaaattaagcagatatgggtaagatgacctattccaaagtgaaaaactggaaaaccaaagtcttagcctacagtttcagggacgagggggaactaaaagatgagcactttatagtcaagggagaaaaatttttttggagtcagcaccaaccagctaataaggcagctgggggccagggccatggggtggcctttcagacacacacacacagctctgagcctctgggccataccttgtaagaactaggtattttgttgaggtgggggtagtcactgagacctgtgctatgggagcctcctacagagggctgctctctaggccaggtaaagtctgggtgagacaagaaaacattccttaatgtggccctgaatgaataaaatgtggaggtcctcccaaatgcagcagcaggctaacaggtggactgcaaggctgtgccctgccctgtctccctgcattgcagctgttggggtctgggtgttcctggctaataatccacaatccaggaaagggctgatttggttgtgaaggtccaaatgagaaaagattctcagactggtttgtgcaaatggttttttttttttttttatttccacatttatatcacaaggtgtccacttactggaccaaatagcaaagttgctcccttctgcgtcctgagaacacagaagtctaggtactgtacattcactaaggctccttgtttttgcaaatcgcgtttatgacaaataaccataaggcaaacgaatctaaaggaatggttatgagtgtttccagcgtacagacaggtcttccccctcgccccacagtacagcataaaaccagtagcacccacaataacttttgtgttgttttggggggactctagaaaggtgaagttttctagatgtgtacaggaagggaaaaaagaaaagggaggaagaaaggaaaggtttttttgtctggtggtctgatggaagaggaattgtttaaaataaacatgagaaaacttaaatttttgcagcatttctttaaaaactgggttataactgaaaccagatataaacaggtggctgcccatggagtgtgggtcacactggctggccagctggcccgcctgcccaatgccagtggctcaccacagctgagaagcttctggcacatgacagacaacactggcctgacagtggctgggtagggagcaaacagaggcagtggcatggcccactgtctcaagacactcagggccaaattaaagaacagaaaatgcaagagagatgagatgcgtgcttctgttgctgtgttaaaggtgacctctcccacaggttttctgtgcctgcctgcaactgaggccccagctttcaggtgctggaaagtgtccgcacctctttgggggtgagggactaacgctttttatagctggtttgctatagagttctgaactcactttgccgtccttccttccacgcggtccttcttcgcaattttgttagtaaactggtagcagcatttcacaaaaagagttttgagggaagagcgcagagagaccgcgtgactcccgccccctccctcccgcctgggccggactccccgagttcccagcgcaggaggcagctgggccccggccacctgcccacctgcctgcccgcccacccggcttctgcaagatgggaatgcactttgtggctgacaggccggtcagtccaagcagacataaggcagaatgttcaagcgcccgtcgtcgccgtgcggatcgagcgatatgcactgcgtccagtcataccagttaccctgtgtgtcctgacacccgttcacccccggccactggctggcctggattctgtcgagatcgtcctgtgtgacctcccgggtcagaccagggaggtccgtgggcgggctttgaggcaccagcacatgcagctgcctggccccttgccgggtgctctcctcctgcttcaggtactcagacatgaagtggtgagcccctggggtctgcgcgcccgatgatgagagcaggctgctctgccggctcaggtaggactggatgatctcgttgcgtgacagctccttccagttcgtctgttcgaaggggctctggaggctggccttggcctcctgcttgtccagctctgtcctggactgctgctccatgtgcacagggctgtctgcccgcactggctctttctgggtcagaggtttgatctgtctcgtcatggggtcaaaggtgagcttccgctcttttaaccggacaggcttgacgcccgcctcagccacctgcccgtccaagttaaccgtatagtctcgaggtcggtacctcttcttctttttactgtccgagccccctgaggaggcagcatcactgtccgccttggaggagtctggggaaaagcctgcccgggacaggaggggctcggctggggacagccctgccttgcagcccggccccgccagccgctggtggctctcaggctgctcaagccagcacactgggctttccgcactgggcagcagctcgagccgccgtacggggggtgtggacggctgtgccagtggaagcggtgacggcacctgtgtggcatcgagtgcctggggccgcggtgaggggctgggcacggagcccttgggtgcatacaagctctgctgccgggcaaaggagccctcatgccgtgagttccgaggactgaaagagcagcgagggggtcccttgggatggggaggccccggagtctcgtccaccctgtccagctgctgcagcaccgaagcctttggctgcaagcagggtccagggggcttgcccaggcccggggagctggtgtgcggtcgcacggcgttgacggggatcttgccactgtgcttgtcattctcgtcacgctccaggcggctgccctctgggcctgcatgcccactgccatccagggagctggcgaagctctctggactcccactgatcccgttggtggggaggggggatgagttggggaccagggggtcgtggctagctttggagaccttgggtggcggccctgggtggccgaggtcacgctggtcaccccggcgcttgcggctgcccagcctgtccagccgctgcccgggcagcctctggaggtcattgcggctcttcaggtcatggatgctcctgggtgggccagccgcccccacctccggccggcagttgtgtgcgcccccgttggcagagccggtggcccccgccagcccccgcagcgccgcctcatgctggtgtgccggctcgatgagcttctgccagctccgcagcagcttcttggcccgcttggcgagctcctcgttcttggttttcttgcggacgtcgttgatgagcttcccaagtcgtgtttcctacaaccagagggagatgatgacatactttcgggacaggaacttctccatgagctgagccagaaatggtgggaagtggccctgacagtgaaatgacccggttcccactgagccctaaactgccagcttccctgacacaaaacttctggggatttccggtcctttgtgacaatataaattctcaaacctagttcccagaccttcagggtcccaggtggcttctcagcagtgctgtcacccaggctcctggtgtcagggggctgtggaccatcaaggccactgtaaggacactgccagagaggcttcctgggtgagagggtgctgtggccgaggcgacagcacagagggtccgcttcaagtggagggttggggatggtgcctctcactggagcctcctccaagcacacctctcctgatgtccccacgtgcccacgaagtgtgctgggcatgtaggatgggagtaacaccacttggtctctgcagtgcccgtgggagagcaagatcgcgaggcacgagctgtgagggcacaccgcctctcttggtcctccgaagcaaagacactgatgctcccagaagctgcggaaggacctggttggtaccatcccctgccccccgttctgccctcccaaatgctggggtctgggatactcacctcaagtgcctctttggtaatagggtatttctccaggctggagatgacttccagcaccgccaccatgttccggatctgtggaaataaaaagccatttgtcaggtccctgtccttctccactgggaggctggaacaccctgccccagcctgctccagtctctccccaaccccagagcaagaggagccagcagcactgaagcccccactccatgtcgtctcctacctgctccctgggccaacctggcacccagtgctcatcctcacctgccgtctgacctcctccagtgtgtggtgtgcgggctgccccaagccctccagtgtacatggtacatacccacccacctgctgaaacccaggatgcctgtggaacaagagctgctcctgatacttaagatgacctctactctgccatctgatgggagtgggagaggagacacggaagaattcatcgaataaaatccacaaagcttaaaagatcaatacacaggccaggcgcggtggctgacacctgtaatcccagcactttgggaggctgacgaaggcggatcagaaggtcaggagtttgagaccagcctggccaacacagtgaaaccccatctctattaaaaatacaaaaattagttgggtgtgctggcatgcgcctgtagttccagctacttgggaggctgaggcacgagaaccacttgaacccgggaggcggagggtgtagtgagctgagaccacaccactgcactccagcctgggtgacagagcaagactccgtgtaaaaaataataataataataataatgataaaccagtcaatctgaatccaaagacaccataaagagagcagaaagtcacaaagtgggagaaggcataggccacaggcccccaaggagctgtatctggaacacagaatgcctgtacagcagtacagctgaccaggagcccggcgtagactggccacaagacaggaacaggcacacggcaatgaaatgtcagtgctgatgctcagcctctcagctttatcgataatcaggaaaactcaaactgaacccacaaatggatacatgatacacgtgccccactgacaacactaggtacttcgggggatacagctgactttggggactgctgggctttgtctggcagagtgaagcatgaacacatcccatgaccaagtaatccctcccttttaggatcttgctaggagccacaccttgttctaagcacttcccacacattactgactcccttaattgttacaacaagaattcctaccactcaaccaccacctccagcaactacaggtttctggtgggctggctagcgggtgggagcccaggggccctgaggaaaccacagtgagtagattactcaactcccccccaccccaacatgataaaggagttaagcgggcacatgatacaaattaaaacagcataaaagggcacacaaggaaatgggcatctctgacccagccactgtagcatttccttgcatttttttccaaaaatatcccttgtgtatataggcgtatacatccacacttatcacatatttcaaaaccaaactgacagtggttcttgccttttctgacttaatgtcagcaatgtccagcctcaaacagagcccctcatttggctcaccatcccttccagagtggggaaggcccgacttgaatgctgtgggacacttaggcactttccgtccgccattacaaaataaggctgcaaccgacggcagtgacagacctgactctgagctagtgcacagacagccatggaggagctggggctccacatccatgcagggtggtcacctcacccccagggaggctgctctattccattcccaccaggccacatccttgccaagactgcgtggcaagagtttccgtaacacatgattgtaaacttagcatcttacacagcacacatttatcatcttaggctctagggctcagaaatcaggtctgagtctcactgggctgggatcctctctagaggatccatttcctgctccttcaggtgttagcagagttcagctcttattttgtttttttttttgagatgaagtttcactcttgtcgcccaggctggagtgcaatggcacgatctcggctcactgcaacctccgtctcctgggttcaagcaattctcctgcctcagcctcccgagtagctgagattataggcacccgccaccacgcccagctaatttttgtatttttttttagtagggacagggtttcaccatgttgaaggctggtcttgaactcctgacctcaggtgatctgccctcctcggcctcccaaagtgctgggattacaagcgtgagccactgcacccggcccagagttcagctctttacactacaggaatgaggcccattttcttgctggttgtcatccgaagccattcccagcttctggagggcactgcatccagctcacaccccctccccttatgctcaaagccagctacaggctgagtcctcacccggcatctctctgacccagccaggataggtgccatctctaaggactccctgactaggcagggcctgcccagatgatctcggatcacctccccatctccaggctgttcccttagtcacatctgtcatgtacggtaccatgtgcccaggctccaggactagaatgtggacgtccttgagggctgttaattctgctggcctcatggattctggcttttctactcttctgccccacttccagtgggaggcagccactgccactccctcccttcccgtgttgtctcctctgggtgtaaagttgcagagccacgacagcagtccccgcagaactcccacaaagctgccctgccaatgggcccatttgctctttggcaacaacggccttgccttgcaatgttctccattcagggctccaaatgaccctgaaaaccctgcttcaagctgtgtcatggtgggggtggacgggtgatatgaggggagatacagtcctgtccgcactcctcgtgcaatgggcagggatcagtgcaggggaagactgtgcgatgaggaggccagtcccagacagacagcaaggccaaccactccctgccccaggcactccagcaccgactcagtccctgggcttgccacatggcttcacctccaccctgctgacctcaccctggtatatttggagccctggttccccacatactcctgaagcagcagtccttgcagagcagaacactgcccagacccagctagcctggtggcacaaagtgtccttgtccttgggcagacaccatcctgctgccagacaagagggaggagacagaacacctgggcaaccccagggtctggtactgagctggtgccccagaaatcaccgctgaactaacagccagtcccaagagtctcctggaaactgtgtgggagctggggacaccaggcgaaggtgtgagggccctgtgactgtgtatccttacccttggcccctcccctgccttatgagccacgcttaagcgtgtgcagagaggccttcagcctctaggagccccaagggaaatgctacagccttggcagtcccctttctgtccccaccgtgtgagctgctcacctgaggagtagaggagcccgcctgctctacctgtaaggtgctagaaacccacagtcctacgccgtaaacagatgaactctgccaacacctgaaggggcagaaaatggatcctccagagaggagcgcagctcgctgcttcctggatcccagcccggtgagactggagctgacttctgagccctagagcctgagatgataaatgtgtgttgtgtaagacacagagagagggtgagtgtccagtgcggccactccctggagccagcagaaggcagtcagtgatgtcagcagagctaaggatgggggcaaggtgagactgccctgccctgcgacctctggggcattgatgtcaagcagtctgaacactgtgtggggagcaccacctgggcatccagacacaggcctcccaggcccaggaggcagacactgagcaatgcagcgaggaatccctgcaaagggcctggccccgaccccaggcacactgagccagaaggctccacagagcctctttatagatggccacagtctgtcccaaagaacacttagcacccaattggtgctggtcccataggagcaaaataggagctggcttctgaccctggccctggggaccctgccttaacaaccaactgaccccccacccaggagtggcaggtctcccactctcatggaggtggccctctgtgagtgacagagacaccaggactcgtatgtggctgaggggaggctcccgctctgactccaggcctgctaagtccagcatgaaccctcagggcagggaggcaggccacagggggagggcagcacctaaggtggcctcccagggaggtcaaaaaaggatgtggcagaacgagctgtgtccacctgggctggagaccgacttccatgctggaaagcagaaaagagctggagaaggatgggcagggagctggccagacagcaccaaagccctgcggcaggggagaggccatgggtaaggacaccgggaggaaaaacagacccaaaagacccaaggtggctccttcacaacctgtcttctatcccccttagcgactgcccccacagaccacctgcccttgccctgtttctgggatgcccttggcacctgtccatctatctggggaagtacactagatcctaatctcagcacagacacagtttgactccacatggggagccgctccaggcgatggcctcaaaagatggctttaaggcagctcttcaggcttgccagggccatgtctgtggcccgatggccaattgcagcctcttgctgtcaggaatagcctggcacatctgaggccccctcctcctttggattctcccttgggatttgttcccagtccaaaaaaacctctcaaaacacctgccaagttgctttcccaaaggggcaggaatcccgtcaggaactgtagcctctcacttctccactagggacccctcaatagatgcagatgggtctgaacttccttaaccatcaacgaagacaggcgttgcctcccctttctaccaacactgaccgcccctgcccacttaatttgcttcagtttggcctcttcattgctgcgggaagtgcctgtgaagggcaagggtgttgggtgggggtggggggtgtcgacagcagaacctccatgcagctactaggagaagcaggggtaaatgcagcaaggagcactctggaagcaggtgggacctccctggggtgcctgctccaaaggcaggcagggcaggaagttagcaggtgggaccaggtgtggcacaggtatacatgcaggtccagcccagccgcctggtacatgaatgttgatggaactgactccactgtcacaccgaacactttcaggtcttagaatggaaatccatgaggcatgatcaggtacacatgggccaataggaatgtgaacattaatctcgtccttctggaatctcagaaaaaccaagcagggaggcctggtctcaggtcataggcatcacagctagcatagatactgaggaagaacagtttgcatccaggcagagggtgaactggggccaccagcacaaccctcagcacacaggtgccccacacttcagggatgccccaggaacacacgcatgggggcatggaggggacaacttctcgcccaagaccacaagaggtctggctgtcccagggctcttttgtggtcatccttccacatgagaacttaaaaaggcttccacgggcgcggtggtgtgcacctgtaatcccagctactcgggaggctgaggcaggagaatcgctcaaacctgggaggcggaggttgcaatgagctgagatcacgccactgcactccagcctcggtgacagagcaagactccgtctcaaaaaaaagaaaaagaaaaaaaaaaccgaaacccaaacactgcccccccccgccccgccaaaaaaaaacaaaaaacaaaacaaaaaaaagaaaggcttccggaaaggctggcacctttgtccccagagagccccatagcctgtgctaagccacaattccagccagcctaactggtgacatgtgctgttcagctcacaggaaatgtgaggaaggaggcggggctggacacgcacagagacagcctgagggaggggccagcacccctcagaagcagcctgggtcaggcgcctggagctgcgtgagacacctcattctcccacaccctgggagcagtggggaaccctgtatgcgacttcacagcacaccacgctccgtgtgagctattaaagacccaccacgcatcctcgtctttcagtgacactttcctgaagaaataatacaatctggaatttgctacagaatcatcccctagggtgagtgacaggagggggatgggtgaaacaaagtcacatggctgtaagcagctatctactgaagcaggatggttacctttctctacttttatgcttgaaatttctcacaaataaagatgagaaaatacatctatttcctagcatttgtttgggagagttcactgatctagaaggactggcagccatctaaaggggaagtgagcaaatagctgtttccaactcctcatagtggcttcactgtccaccatctggcccctgagtggggcagcaagggccgagggctgggtaggatgccacctccctccacgtgagcctgtctcaagtctcaggcctcctaactgatttgaactgcacaacaccatctatctggtgagaccccaggagcccctcaccaagctcccctactctggtactgggctgctgcttaacagacctggtgcagaaacagcaggcacccctggggctggagaggggagctctgagtacccatgccagctgtccatcccggtccgactctcaggtgtcctcacgcctctcttctaaaggaaaccacagagagcccgaaccaggggcacacgctaggtcgacagttccttcctgcagggagaggcctgacctgtaccaggaaggagcccaggacagccaccaccacagagaggacaggccctcaagtggcccagaccaggagggaggacttggcaagaaggggtgggggctaggtcactctcttccagaaggggagaaacataacaatgagccagcagtaacccagggaagggacagccgtcactccaggacctgcccagccccagtcagcaccacctccctcccatctgcgatccacatcctatggctctgggcacagctgagccacaggacacagccactcagaactttctttccaggtttccctcaaaggccagccagcagcactcctctgtggccctgtgaaacccagtgacacctctgacccctccggagtccggaagactagactcttctgaaaacccacctacgacagggtgcgtggaatcacctttcaaaccaaactcctgtcggcaaatattttaattgggccacggcatgtgtccgagtttttcttctgtgaagaggatcactgggtctgagtgcaaagctggggcctgttcagtggagtggacccgctactggccaacctcttcctcgctttattacaggggtgtgtaagtaaaaccctcaggccctgagtaattactgctggggatttccagccctggtctgaaacaaggaactgagactgagttttgagtcccagcagccccttggcttgcctctccattttctccacatctgaactgttcccaccccgcctgagatccccagcctcttgggaatgcagctgtggtagcaaaggggaaaccctgtgctgcccaaggtctgaccaaccaatagtcccaagggtgctgagcctgggcaggcccaaccgggcacaactcgcacaggaccatcactggtgggttgcccttgtgccaagttctttcacgtcatcctcacaagcgcactctacagataaggtaactgagggccaggaaggtaatggaggtcccgggtagaccacacagctagaagatggtgaggcctggccttccactagcctgacatggctaccaaacacacagggcccatctggtgctttgagtaggtggggtgaagggtaccaggtgccaccagcctgtggtgatgtcggcactctgtaaagactctcctgacgtgctcctgcagtgaaatgcacaggttacaaacagttccttgaacccacacagggccacctccacggtctccgtgttgtctatgccttgtccccaggatgcctgagaggcaggaccagggtgacccaggcatgcacgggccaccacagcagggcttcagatggcactggagcccactccccaccgggctggccctgggaacagtgcacatggagcacagactgcagttctgcactcccccacctcggtgtccggccagccttcctgaccaccctggacggtgggcggcactgccctggcagcctgtgggcccgcacctgtgccccacagcccacataacctgctccttgggctcaaaacagcccctgctgaggcctcagtggcaaagcacctgtaaaaaccggttcactttaaaaacaacaatggggatgttgtcgggttttttttttttttttaatgcagaatggtctagacagtaatttacaaaaactacttagctcaaaagactgtggaagtgttcatcagcaagcaagctgtccttccaaacccaaacatgccacagatggcacccagaaacagacagtctgccttcaatgtgctaagcattctaatgccgtccgcggctgagtcacctcgcccaccccccaacccccaacacacagtcgtgtctgctgaggacacacgggtgaatcaaacagggctttgctgggagagtgtgtgtctgtgatttggttcccgccacaccaagtcttcctgcttctgacaaactccgcacgtgttcccaggcagctgggagccaaactgcctctggtgcaagtcagtacaagaggcggcacctgcatccccaccccacctccaccccaagaccccagctctgccctccctctcagctctggaaagcgcagccctgaggggtgctgctgtgcttaccctcaggcgggccccaccctgcactctccgctcagcctcatggggctggtgcaggtccaccaggctctgcccagtgaaggcaccttcctctgaggggacctcatgggagcctcaaaccccaggggcaaagcctcaagttcacagcttctcagaggaagaatgacactgggaggaacaatgacgggaaggtgcatgtctcggccacagccaccaagctcaccacttgaaaagcacttcctgctggggccctcctgctactcccaggagcagccggccacctgagtggtctgtcatgtccatgtggccctccctgtcctgcagccacagctcctgtaatgcttgggcaagtatgcaattgcatgctacaactcagcccgggggacgggaaatgccacctgagtacaggcagcacgcggagccctgactgaaccccatgagcaactcagaaagaggaagcccagggcttggggcagaagtaggagctccatcagtaggcatgcctgacttctgcagcgagggaaacttgcagatgaagccaggaggcaggcagcgctgctctccacagccactgcccccacagcgtccttccctcccactttctgtttttagcagctcttcccaaccaaactaccaacctagactctcctgacctctgcttcaggtctgcagaacttacgattcttactgccatttggccctttgtgaaggcacaagagctctcaaagctcatctgtaaattgactcgttgctacgcggatagaactggagcagtgggaagccaagcggagtcctggtgatagcacgctgggtgggggcttctccctctcagcctctctcttctaggagcagctgataagaatgccagctgcagaagactggaaatgacccaacatcctcgggggaaacacacacacagtgctcggcccatatatgttccgccaaagacagagcccaaataagaacgagccagcttttcaggaatcaacagggaacaaccttcaagagactgccaagcacagagatgcacacaacagcgcaccctgtgccgccgcctggaagatcctagctgaggctgggcagacaaggacctgatggttgagccgcgcatagctgtagcaggggaccgcacctggcctccagcactgacgcaagcaagacctatcactgactggagcccagttcctcctctgagagcatgagaaaaccacaagatggtgtctgtagagcatgaatggtgtgctggagaccacgcccccaggggccaggccacgaggacccgcacactgcactttctgctgggctgctctgtggtctgtaagatccattcaggcagggcagtgcccagcacggtgcctggaggcagcctcagaggcccattgagagaggaagccgaaggagagcagccccccgcctgcctgtccaattgggctgctgtaagatcctgagaactagtgaccttctagaattccccgagacaagtcatcaaatgctctctgagcaccgactgcacacaggtgctctaccaaactctgggcccgctggatgctgggagggggcgttaggatccctgtgtactgacccggaggagtagacagagacagccaaggtcaagaacagaagcaacagataaaatgccaccactgaggctctcacccaggctgccaggaaaccccaggggaggactacacttggctcaggtccagggccaccccttcccccacagctcctgggctctgtgtggagctggagggacaggagtgggcacaggggccttctcattgggcattcctgcaacgagggccacggtgcagagaaccaaggacactgtcacccaagaaagagtctggtgactctgtggatcccatggtaaccaccatttaaggatggacactcacgctatgatccagcaattccactccaagcagcacctacagaaatgcactcagagcagctgtatcagaacagccccaactgaaaacagcccacgcagccaccaacagaacaccgaataaataaatcatggtctgtccattcaatgttggatgaacaaactgctgctacacataacctcaaagacaaatctcaaaacaacgttgagtcaaagagccaaacacaaaaaaacacattttttttttgtcctggattaaaaggtcaaaagcaggcaagacttctagatggtgagagcagtcagggtagtggcaggcagagaatgactaggagaggacgttgaagatggcttcaggggaaaggctctgttccttaacctgggtggactggggttctcagatgtgttcataaatgttcattcagctgtaaaacttgggacttgtacacttttctagatgtatattttctagactatatttacaaaggttgttaaaaataacctactgtgtgtgaattccatgatcttagaggccacctcatcctacagaaacagatggtgaagctgtcagggttgtggaggagggggaggtgttggcaaagcagcccctcgttccccacggcccagaccctctgagagccccacagaacaaggtctgaaaacagcttcaacacaagccctggccacctctacaacacacagtgatgcaatgtgcactgcacttcactgctcactgagaaacgtgtctgcactctcctgccctggatgggactgaggaggacaagggcactctgaagcttccccggcaggagtactcaacagatgagtgtccccaggaagaagtgagcactaatgctactggaaagaggcaggcaggcagcacccactgggcatggtgccagcaccctgcagggcactggggtcttgccacaccatggtctcccctgagaccacagatacgccccctccacccccaacaggtattaagccactttcccatccaagaagccagggtgccagctggccacagattcgttactaacctaacctgctaccccatgcagccagcacacacctgcctccctgctccactgtgacacaggacactttaggatgaggcaaatctgcacatctatacagcggaaaaggacagtgaagaaatgcctcttctactcctagtttgctgagaggttttatcaggaatagatgtctgattttgtcacatgcttttcctgcatgtactgggatgattataaggcttttcatttctggccttgtaatatggttgattacacacattttcaaatgttatctgcctcccttgctttaatttcagctccctttctttgctaccttgattgtggtgttggtgttactgatgtacttacaagttaaaatttatcaaattatatacttctgctatgcgcagtttattgtatgtcaattatatctcaataaagctattaatgtcaggcacagcggctcacacctgtaatccaagcactttgggaggtggaggcaggtggatcacctgaggccaggagtttgagaccagcctgggcaacatggcgaaaccctgtctctactaaaaatacaaaaaaattagccaggcgtggtggcaggcacctgtaatcccagctacttgggaggctgacgcatgagaatcacttgaacccgggaggtggaggttgcagtgagctgagattgcaccactgcactccagcctgggccacagagagagactttctcaaaataaaataaaataaataaataaataaataaataaataaataaataaataaataaagctattaaaaaaacacccatggaggcagacagatgcagcaggtcctaggaaaagtaggagggatggcaggcagagagaaggactgcttctttgttagagaggggaaccagatgccacctgggtttgtcctccctggggaaggagggtgggccctttggggaggctccttctctcctcagtagaaggagaatgactgtcacgcctaggatctcagagggactgtaaggactgaaagatacacttgagaatgcacacaatgcactccccatctcagaccagactcctgcaggcatcagtaggcacctgctttttccttctgggacattctgtatgcacccacaaacacttgtgcactgcactgattaggcatcctaattgtagctttggaaaaaagctgtagctgaagctgggtcacagtgtcctatgagctgtgaaataaaatgccaagcagccaccaagccacttcccaaggctgaacttacacacacacccccttgtatgcctacctatagggtttggtcatacttcactggagacccaggtgaaggaaccaacttcctacactcgagaaaaggccagcggctgcagacatctgcaaagtcttgggcaaacgacagtctgctctccccaaaacatggtgcaagcaatgatgctggatccatcctcctgacctgaaagtagccacggtgcgtctgacagagtcttttccctcctaattccgcatggttttctcctatgggaattaagctcctagagtgagaaatctgtctgaaatcctgactttccccgctagagagctgatctagatccttcctattcaagtgtggcctaggggtcaacagcacgggcatcaccagggagctgctttgaaacgcacaatccccatccccatcccccctagacctcctgcatcagaagctgcattccaacaagccctcaaggaggcccagccccacagggatgatgggcagaggcacccaaggctgtgggctctgcttggcaccatgtgcccagctgcagccctgacccctacttctgtggccagccaatcagaggctccctggtaacactcctggcaccacctgcaccctgctttccagagtccctcccaggtgtgactcatccaatccctctgacaactgtaaaccctgagggggtgtgatgtgcccaagttccatctgcaggaggggactgcagagtccataccacgaccccacagagcccaccaggcacagctgtggggccctgtcccgtcccatgccaatctcagagaaagcctctcccgatggtggtgtgacagggtccagacaaaccacaacaggatgaaaggacaggaaatatccaggctggtgggggacgtaccgccaccaaccagcaatggccactgtcagggacaatggcatctggcagaggctggggagctcccagaggatgttagcaaatcacgccacacatgtcccttccaaacaaagttcagcagcagcaggtctcacccgctcgcctaggcatgacatgtggagcctgtcaccagcttcataaccagtgtccccaccttcatccacttggctcccagagctcctggtcaaaacggcacccccttcttctaaacctcaaagccggtgtttctaagataattccacttcagctccaataaggacctgagtagcttctgcgggctggaccgatgaccagttattgcaactggggacattttctaagggcagatgatggctgtcttggttccaatcaactgccttacaaaccactgccctggaatgcaactgttccaaaggcggcatcactcaaccctctgttttaaaaacacaagtcaacgaaaataacaagttgcaccaccacccccaactcacagccaaacctcccacaggactggccgaattctgccctgcttggctggcgccgactctgtaggtgggccaagcaggcaactgatgcccaccaatccagacaccagcacctggtccccaggagggccaccagcccacagcctgcaaggagaaaagaagaaatcctcctacggccctcagtgacatctcatagacccaacaacctgatgccgaggtgcctatccgaagtcactgcatatttcatcggcaccctctggcccaggctgtgcagaggacagggccaaatcaccacctcaccattcactgggtctggaaagcaagccctttccagcaagggagaggcagggaggcatgagggagctcctcccctggtcatctggctcacagagctcttcctcccacctgcccacacatctgctcagactttctttagccctcactgcctgcaacacacccgctttctcacatgtggtccagcctccacctgcaggtctgctcctcaggtgcagggaccttggttttgttcactgttgcctcctaagtgcctagaacagtgcctggcaactagcagggacttgatacatgccaaatgatgggtggatgaagtccctcatccacggttgctggccaccatgttcactccaatatcacaaacatctcaggggtctccctctgtggcaagtcaacacctagagagcaaacacgctttgtcccgttgtcagctgtcacctgcactggccatcccagaggatcatgagaacacagtgactcttggtggtcctcacaaagcttcatcaaagtccaggtcaagggtgccatctctgagtgggtcctggagatgctgctagacagaaggccacctctcctgtccctccaaagctgtggtcaatggtggcactggctctgctgctctctctcaggcaaacatgtttgctcagcaaggctcaacgtgttttgagagagccttcgttttcaatgcagaggtcctggaagttactatgaccacacaaattttctccagtttaccttcttggcaatcctaaagctattccaaattgttatataaggagggagaagggaagccacatgagatttttgcaaagccacgaattaaagcaatgtggaaattaaacctaacaatccactgtggttaactcagtgacaggattatccatatagtggcggcacagtgtggcaaggcagggagagtggaagcttgctggtagaagcctgtgttatctgctggctacagtgagggcacactcaagggccaccagggctcctgaggccacttgccgccgagagccaaatcaaccacttccttcctttcccactaaaggctaggcagcccctggtggctctggggaaagcccagccacacagcagtggccccagtcaagccccaagtggggtggagcggatctcaccggtacttcctgctgtggacctgaaccacgcgcatctcacaagtggggaaggggcagcgaaaccaacctgagaggccatgatttggcctgggctaaatgccagaggacaccctgcagcgagactcgtgctcccttgtcatgacatgtccaaggcaaggtggggtctgagctgggttctaggagaggcactgaagtggcctgcagaggtggcagaccactggacatggagaaggttcatttttcaccacggtgaagatgaagaagggggaaaaaaccagaactttcttcatttgctaacagcacctcttcaatattttaaaccttttttaacttaaaaaaaaaatctggtttcccccaccttcatcttcaccacacaagtgctgacagtcaaccacagccacagaaaatgcaacagtgcaattaagggcaggaacgcatgtttttactacaccctaaggcagcattaaaaagtgctggctctggaccctacctgtcaccacaccaaaacggctctacccagggaacctgtcaccaaagccagggacccatcagcctgcctcggcctcacctctcagagcagttcctcgaatccagggctgctccttcctcctgaactctgctcctgccggtggcccctctacagtctcaacttcctccacttggggctcctcaggccccaaccccagatccttcctccctcactgcggattcacactccaggagcagtggcagcaccccccatgtaggaaagcccacagtccaggagtcacctccagtaggtgcctctgcgttggacccctgtttcaaagccctgagatggttgaccccagccctcctcaaacccaactcgtgacacgtgcgcacctctttccagctctgtgactgtctagacactctgaccacattgggcctaatgctgtgctgaccgagcacaccgagggaagcaagaagggacctggtgacttgattgtgcacgtgctctcaccctgcccctgtggtcttcctctcctctgagagcatctactgagccactgctgttgtcagatgtgcgctgtcttgaaccccagcagcctcaggaggtgagatgaacattgtcattgcacaaatggacacctggaaactcaggaagggatgacatcctgtggtggcttcaggctgagagtgcccagcagacccaagaatggagaccagtgctcaggtctgacctcagaggccaagctctgcacagaacaaagtgtggagccaactcacacccttcactcccccaacagcaatgctttcctgggtgactttcccgtcctagtccagtgccagtaacaattatatcactgcatcacagatactgcattcttttttcatttaacacttcttgttgctacataatcttcaagatcatgtctaacagctaaatgttctattaatgtatcataattcccttaaccttctccgattgctgggcagttcacttctttctaggttctcctgctgcaaccagtactggaatgaacatcttcaaacatgcttccttctctcattttttccttaggaatcaattcccaggtgttaaactttactccaagagagttcaaatactgtcatggcaactggtactgcctcaacttttttctttttgtttttcttgagacagggtctcgccctgttgcccagattggagtgcagtggcaccatcgtggctcactgcagcttcgacctcacttgagctcaagtgatcctcctgcctcagcctccccaagtgctaagattacaggcaagccactgtgcccagccatgcttcaactgtttttggctcttggcttccacagtgcaatgaccccatcacaaaagggagggagaaagcagttaaatctgctgtgccctgccaagggtcccagaaagcaaccccatgctgcgtcagagctgttatcctgccctccttatgtttcccttgactctgcacaggtatggcagtgtgtctccaaacgtgaaggccagtcaggcaagagagaggatctggcacagacattcataaataatttcctaggactggcactgaagccatactgcccacaattgctgaccacagcctcagccatcgagtgcatacgtgggacacctccttgcgtggagagatgcagacaactcggctgcacgctgccacacccagctctaactcagacaggcatgtgtcaatgccattgttgctctacctggagcaggttacattccttcaggaacatgctggcacagggtggggatgttcctgggatgctgggcaggatgcggggttgaagtggaagaggcaagagcagatctagcccctcttccacgccactcccttcgcccttcacaaaggaacggggtgacaggacctggggtaaggtcttccaagactcctccaggtgtcttgggcaaagtgaggccctggacggggttccacagcctagccacttcccatctgctggcttcccagcctgtagcccttgcacggcacactgtgccacagccccaaagttgcaaacaaatggccaagaatgaggtgggccaacttgcagcagttcatattccaacctcacaagaagaccaccactccatcacgaagtcctatatctcacagaccacgcccacatggtcagagggtgacagatgccagaggggaacagtgcccccaggttcatgagaacaccaagcctgagcccgagcatgtctaccagacagggccaagatggtggcagagcctagatccttctctaggaactctgggttcttctgggacacgggtacagtacaaaagctgtagcctgagatgacaacctcagctatcaatcccacgtccctgtgcccagcactgccagctgacaataatctcaattcagaacagcctcaaaagcaagttaagtttcccccacttcacaggcagtgcaggacccattcagggctctcctgctactgttatataccagatcccagtatgacacattctccgacattcccactttcctagtttatttcagcagcacctcttgaggcaagaagtcaacttaccactgttgtttcacaccgcacttcctaaacaggtaacatttaaggttagacaacagaaacaacacaccaagacaatcatgcctgggtgagcatcaggttaagtttgtttgcaaagtttgccatcggaaaatatgaaaggaggcacacaccaacacggtcctgagttcaccctctctctcctggttcccagcagcacacagaggtgcgtccggctctgtgggctgcttggtgcagccttcgtttaccctttgttcttgccacatcagagccagccactttctaaggctggttttttgtttgtttgtttttgagacagggtcttactctgtcacccagtatggagcgcagtggcatgtgatctcagctcaccgcaacctctgcgtcccaggctcaagccatcttcccacctcagcctcacaagcagctgggattacaggtgtgcaccaccttgcccggctaatttttttgtatttttagtagagacagggtttcatcatgttggccaggctggccttgaactcctgacctcagatgattcgctcaacttgccctcccaaagtgctgggattacaggcgcaagccattgtgcccagcctctaaggctgttttcaaattacctccctggccaggtgcagtggctcacgcctgtaatcccagcactttgggaggccaaggcaggtggatcacctgaggtcaggaattcaagagcagcctggccaagatggtgaaaccctgtgtctactaaaaataaaaaaaaattagccgggcgaggtggtgcacatctgtaattccagctactcgggaagctgacgcaggagaatggcttgaatccgggaggcgcaggctgcagtgagctgagatcacgccattgcactccagcctgggcgacagagtaagattccatctcaaaaaaaaaaaaaaaaaaaaaaaattacctccctggagcttccagagcccaggctcaccccacccccagaaggtcggaacacaagactgccccttgactcaggtcccacttgggttctggcgacatgatggtgatgccctggcctgcctcccagatgcaccccatcattctccttaacccagcagcacttgctggtggcatgaactgccccacttggcatccagtactgttccctcccagcaacacagcaaaaaaatccactgcttttgctacagttgagaagtcgcgtcaacaactgctgttcccctgcacaccctctgacaagttccaccaccagcactgacagttccagtcctgccaccccagaggtccacagaccctgggccactgaagacctcacttctgacactggcgcatcaggcctactgtgccggacccatcatctgtaataacctttaggacaaactgtaagggagaaaatgtgctatgatgacatcaaataataatgagttcactggctgctgaaaaccaggagaatgttgctgaaaaatttaatggctacaataaataaaacaaaagtaataaaaaaaacacagtacacatactggggaaacaactgaaatcaagtaccaagtcccaccagtcaaacttcttgagcttccctgcccctccccgcttggggacacatgtcctccactggacagctcctggagggcctcatgtgtcctggcgctggtgcagtaggaagcctgggggaagagactgctgtcaggcagggctccagatgccatcgaatcattttgattgccctttccattttttttctacttcactcttgtcttaaacaattaatacctggacttgggtgatatttcgtgggttatacttttccctagtacccatgaaaataaatgcatagctatcaaaataaaacatgctcacctacaagcccataaagtcctttttcacggcaggaaacatggatcctctaacccataggctttgctttatttatcagcagccccttcaaatcacagataagctgcagactctggccatcctaaacaaatgtcacgcctctcacaaacacagagtaaatgtgatgtgtggtgtctccagacctgcaggtagcagatgtgcaggacccaggaacagctgcagggaagagcccatccaagctcccttaaatactagcttttgtcacccagaatcccatattaaaagggggtgatatttggtgggagaggccagggaagaagccctaaggctctgatgcattccggccctctgactcctgatcaccctcactgttgcgccccctccctccaggagcagcccaggcttaacggattccctcaggaaccccagttccagcccctgccaaaccgctcccctaccctgctggcctggggctggaactggggttcctctgtagcaccctgcagcgcagctgggcaagccacttctctgtgcaccacaggacacacctgtacaggggactgtgccattgagcccacaggtgctctgaggacaggagagaggctatgtgcaaagcatctgccctggggcctgacgtagaggtctcaccaccaaagggcactaaccacttgccacagaagcctcaaaagttagacctagatggatgcaaattctaccctctgccctcttggtgcctgagatggggtgaggacacactctccaagcacccacctgtgagaggggggacaggcagtcaacaggcagccagcccaggcccaggcccaggcccaccaggagcccaggagcacctccctggctgtggtgcaccctccctaggtcccccctcatccccccgggccctcctgccacaggtccctgcagcagccccctcctgctccgcacagccttgcatgggctctacttccacctcctcttggcacagccctggaattgtgccaggctgaggaaaggagagcagataccaccccctctagtgatgcattaacactgatcaatgactgggacccctggccctgaagctggatctggcctcaaaatccacttttacctggagcttcactgatcgttggggtgcaggggggcctgccctctccttttcaggtatgcccagcaatccccctatccaactgcacatctgctaatactgccagaatttgacaaccctgcctctccccacagaccccagaggccctgtgaggaagcctcaacctcactttctaagcccctatcagctccctgggttctcagcctcctgccagtggcctccaagactgccttgaactgcaccacccccactgaccccaagtgtaagatgaggcctctgggattctcctccccaacctgctcctcccaaagagaatcccacaggccctcctgcttgctgtaggagctctgctgaagatggactaggaagagctggttcttcacagcctcagtgaggccgatcaggcactattttatttattaagaaattcttggccgggagcagtggctgacacctgtaatcccaacactttgggaggccaggcgggtggatcacttggggccaggagttcaaggccagcctggcccacatggcaaaaccctgcctctacaaaaaacacaaaaattagccaggtgtggtggcgcacgcctgtagacacagctactggggaggctgaggcacgaaaattgaacccaggaggttgaggcagcagtgagctgagactgtgctactgcactccagcccttttacaagcagctaaggcacagagaggtcagctaatctacctgaggtcacacagctgggtctggggcccaggcagcctggttacaaacactgactttttttttttttttgagacagagtttcactcgtttcccaggctggaatgcaatggcatgaactcggctcaccacaacctctgcttcctggattcaagcgattctcctgcctcagcctcccgagtagctgggattacaggcatgcgccaccacgcccagctaattttgtatttttagtagagacagggtttctccatgttggtcaggctggtctcaaactcccaacctcacgttatctgtccacctcggcctcccaaagtgttgggattacaggtgtgtgccaccgcgcccggcctaagtactggctcttttaccacactctcagctgccactcacagcaacacacagataaagcacgcctgtggccttgaaggtgctcctggcctggcaggcgagcagacatgtgatgagagagcttctaagtgtgtagcaggcagggctgtgacactcaggatgctctggggcccctaggagggtgacagagggagtctgcgaggacacctggagagtaagcaggagtcctctggacaagctggggaggcaaggacccgggagcagcacaagtaaagggctgggcacacagcagcgcagcatgcgcagagtgccagacaaggtggggacacctcccggcaggccaccccgggccatgctcagctcagggagtgacagggtcagactgtcgttttaaatagctcattctgctatgcagaagcaaacacacagctgaagcagggagacagttctgtgggcgctggccagcctcagggagcgacatggtgaggggcaggaagggacgtggctgtgggaagcagcggggctgagagagggaggactcaaggcaggccgggaagcccaccactcggctgtgtgcctgcaggggtgtcaggggatggatggcgggatacctgtagccagacaccagggagccgccgtcagcctgtcctactgacgtgcacctgctggttcattcattccctatggaaagttctgagcacagacttttggcagatcacgctgtacccattctgggacaccagtacatcactgaccatgagggaaaaaatggtgccgactggaacacacagcttctcctcaaagacacagaaatgcgactgaaatgggcatttcattccttctcacagcaaccctgagcacttggaggtaggtccaggtggaaggtcttcctcacaccctgcacacagcctggaaccataagccatccccactaccctctcccctcaactgtcatgaatgggaccctgaatgccacacccctaccacctttctaaacttaactcagaaacaaccgctacaggcaattccacttctgggtatgtacccaaaagaaccgaaagcagggacgtggacagacatttacacacccatgtccacagcagcattatttgccatggctaaaacatggtggatacaactcaagtgttcaggaacagatgaatgaataagccaagtgtgatatatctgaacaacaggacagtatttcagccttaaaaaggaagggaatcctgacacatgcaacaacacagatgaagactgaagacattatgctgagggaaagaagccagtcgcatgaacactgcacaattccactcatactcagtagacaaaatcagagaggtggaaagtcgaacagtacgtgcgcccagggctcgggaaggggagggacgtgagtgttgaatgggaacagagctcggttttgcaagatgaagagtcctggagacagatggtgatcatgaccacacaaccatgtgagtgtgtaagaccactgaactgtacagttaaaaacagctaagatggttaagttttatgggatgtatattttacaattaaaacaaaaacaaaaacaaaaacaccagcgggaccctggcagagcccctgctgcctaagttcctaagaggtcctcctgccaggaccactctccctcaggcatcttttaggtggctcctgggccctctgctcctcctgcacaggccactgaggcaaacgggagtctcatgtgcaaataaatggacagggcagccaaagaagagaggggctgggcttggaactgagaccaggaaaacctcctgaggctgtggagcaagttgtatttccaagataagcatgaacatcgctcccttgtgggactgtgggagggatcagatggccatgtgggagaacttgcaaggcccatagtcaagtgccagccagctggaggtgggtctcgatctgtgcaatgggaagcatggaaaccatcacctctagggccactgttaagccatgagtgctcatgagtgcttgagggctttttttaaaaaaaaaattcttcccttcttttcttcttaacttcccacactatgctgatgtatcaagggcctttctgaatgctaataccacatctgcaggagctatgggaagatcctggggaagggacctcagcccctgagccgcagtctccccatcggtcaatagcagggccccaacactgcctatctcggtatgtgggggccagatgtaaacaggtactctcccccaggctcactctggcaggcctcttggagcccacacacccaacctcggctgttcaagtaaagcagtgggggaccaggggagctagggcattagggaagggtctctggctccgtaaggctccaggcagtggtgagaggaccccgaggttggaatgcacatcctgtgagtacaggctctgggcagagccatggaagaggtacccatggaaaggtgcctctgcctgcaaggggcacccacagaagactcccctccattatctgccactgtgaaaactaccacccagcactttcactgcctggcagacctaagcacaagtagaggctcccctgggtgcacagggagacattcacatgaatatctgcaaaacaccttttcattagcaaaactctggaagccagttccatgatcatgaagcggcttctagcagggaatgctatgctgcagttaaaggagtgagctagacccatgtgtaaccaagcacagaaagctgggacacactgtggagggaggtgagctaggtgtagagtgattgccctgtgtgccagaactgactgaaaagccacatgcacagtatggcccagtgctctgggctgtgcctgcacagcacaggaaaatggactctacactagtgacatgggtcctctccagagggatagaagaactgcatcagggacaggggtcaaaggaggcctttagctgtaactcaaacattttacttttttaaaggaagacgtatttattgcttgtgtactgaaaagtcagtgagaaaaaagggaaaagaaacatattaaggagaacgactaagctcaggaacgcccaggagtgcagggccatgcctggatgtgcaggctgaggctgggtcccaggacgcttcaaagaccatgagccacctagattccattctgcatggggaaggctggttctaaggactgtacacaaggatatcagagacaatgggttgcagaaggccaccttaggccaggtttgctgggtgacacctgttactcactgtcattcttaatagcacctcattcatctgaaaagtgtcctggtcttgataagatgcacagtcaccctagctacagggggcagggaatggctcacagcgattgcgccacccctacccctgggagccggctcatggtgacacaagcccacacaactaggttggggaccacaaaaatatgtgtccgtcccaagcctctgtgagcctcatctgttcatatgggtgctgttaccccattttcccaccacaggtaagaaaatcagtacctacctgcagtactcgacagcacccaccagcagtgccaatgtggtgccggtggcggggtgaactggggattggtggtagcccctcagtggggggagggagaactttttaagttacggaaatattctacacctcaactggagtagttacacaggtatacgaatttgtcaaaaatgcatcaaaatgtagcgtagagctaaataaaaagacaaatgtgaaagcaagacagacataactgtttaatgagggacttccactgccaaatgtacacctgaaataggcacattgtactgtatgtaaattagacctcactaaaggcagtttttaaattgttggaggtagaatcagaaagacagctgagaggaaagtccctaagtatggtttttaatgcctggagtttgagacaccagtgtgggcaggacacactgatgaggccaaagggggtcctcagactgagatgagaactgaaggccatgagtgaccaggtgaatgaacaacgcccatggaaaggggaaatggatagaacacagagacagtggcagcagcacctggggccaccatccacctgaggcaggtaggattggccaggctgccccactcactgcacacacacagtcagagagagcagcaggaaaggggacaggcacagggcgccctgccaggagcagtgtttctgcactgtcccagccaggcggcactagaggaaaggagaggagaggctcgggtgaacagggtgggagacatggcttggtgaaggcataggggaacaaggaggcaggcgggagatgctgggcaaggaggggactgacaggcagactccatggcaccgggaggaagaggcttgagcattcatcctgtaaatggatgacccttggaaatgaacagctgaggctgcatggcaccctgccagtcacaaagtgctttttcaaagttgtcttcctatcgaactcctggttacaaagagccaaagctctacatcactgtgtgcggatattcgtgcatggcaaatctgtcatccagacaggccagttttccccttcttccttcactcaaaactgaggcctggcaagggatagagcatcggatcactaccacaccagacagccagacagagccaagctgtagctctacctcgcccttagcgggtcatctggaatccacacgcctgggcccacggcagcaggtgaggtcaggagacaggccctgtggccagcaggagaggctgcggtgactcttgaatctcaggagactgtatggccccataaatgaggccagcacagtcagcacaaagcagcctgaagacacaatggggccgggtgcagtgactcacgcctgtaatcccagcactttgggaggctgaggtgggcggatcacctgaggtcgggagttcaagaccagcctggccaacatagtgaaacccccatctctactaaaaatacaaaaataagctgggtgtggtggcgcatgcctgtaatcccagctactcaagaggatgaggcagaattgcttgaacccgggaggcagaggttgcagtgagccaagatcatgccaatgcactccagcttgggtgacagagcgagactccgtctcaaaaaaaataaaaataaaataaaaataaaaacaaaaacaaaagacacaatgagggagggtttccattttttggaggggagcgggggataagcaaatgtggcattagccacgatgaaacctagagagatttttgatggctcagtgatgaagtcagcaacagtgactgccaccatctgggaggggagtaggctgagacagggctgctcgtttcccaggggaggggtgcctggcacacaccaagaagcaatgttggtgtctggcatcaggagcacttttgcaggtttggtgggaacccaaacccacctgggatgcacaatgcaactgctgcagacacgagaattcattcagtcaccttttcacagaaggctctccctgtgttggtcagtctggtctcaaacttctgggctcaaatgatcctcttgtctcagactcccaaagtgtcgggattacaagtgtgaaccactgtatctggtctcagctgctatttatctcctggaaaaataagaacgttggccaggcacgatggcatacacctgtaatcccagctaagcaggcaactgaggtgggaggatcgcttgatgccaggagtttaagaccagcctgggcaacatagtgagaccctgtctctaaaaaataaatagataataaaaataaaaatttaaaaattaaaaagttagccgggtgtggtggcatatacctgtagtcccagctactcaggatgctgaagtgggaggatcacttgagcccagaaatccgaggctacaatgatctatggctatgccattgcactcatgcctgggtgacagagactatctccttttgtggggaaaaaaaaaaaaaaaaaaaaggagcatgtccatattgtgtgcctcgtgccttctgaagaggaactcagggagcagacagagggctcacactcatgttggggaaggcaggcaacagacaagaccatagccacactaaaagccatgaagaaaataaacagtgtgattaatgtgagttgaaggcttccctcacaaccactgggccagatgaggtggtcacttcaaccccggagccctgagagaacccggggaggtaatacatctggagcaagaagcagtgcaagcttgtccaacccatggccctcgggccacatgcaacccaacacaaattcgtaaactttcttaaaacattatgagatttttttttaagctcattggctatcatcagtgttagtgtattttatgtgcagcccaagacaatccttcttccaatgtggctcagagaagccaaaagattggacaccccgatctagagcaagttgcatgataccctgcctccccttcagggcagctggctcctcgtgagccaatgaggggtgctagacagggccaatgggaaactacgatcacgagaactgtcccagcagccagctgcaaaggcgcagacaccatctggacaaggaacctgtctgtggcctgaagcccggcaagcaggccaaggggcaccagggccctggtgggcaaggctccaggcccaggccagatctccgtctgcacacgttccaatacatctcctcttctggggccgcgagccttcagcatccaagccaggtaaggggcagggactctacccaggtgtgtgctggagcctgctcacgccagctttactgagagagcaagcccgtggtgacactttcaggaatcaaaggagccattactaacaattacattatataagcttacaataagttgtgataagaacaaaggaggaagttttcagtactgtgtactcaaaactcatcacttcctacttattttaccaaacttagtactatctaggtttctgaggttattcatgactactgtatgggcatggaggacatggtgtgctactgagtctctttcccaacctcacattcagtgatctcatgttagtggcttgaagccagccatggtgagagtatttccaccacagaaatcagtaaacactataaatcagggcttgattttatgggctccaaactagaaatctgcaaactcctgggccattccataacactgtctgtttttgtaaatgaagattttacttttttcattttacatgctgtttattgaggtaaaattcacattgacataaattaaccacatcaagttttactggaacacagtcacgctcattcactcacatactgtctctggctgcttttgtgctacaaagatagcagtacaacagaagctctacggccatatggcctgcaaagatgaaaatatttactatctggccctttacaaaaagttagccaactcctggggtttagacttaagaaagtgatggagaaaatgttaataatgcaattaaacttaaaaagcgtgtcatgcctgaagtcattacattgggaacaggacaattgagaaaatattcttatagtacaggtatttgaaaactattatctaattcagcaaagacatcacttgactcattaatacaaagatatcgaccaggctggtgcagcggctcacacatgtgatcccagcactttgggaggctgaggcaggtgggtcacttgaggccaggagttcaagaccagcctggccaaaatgcagaaaccctgtctctactaaaaatacaaaaattagccgggtatggtggtgcacacctatagtcgcagctgcttagggggcagcatgagaatcacttgaatccgggaggtggaggttgcagcgagcggagattgcaccaccggactccagtctgggtgacagagcgagactccgtctcaaaaaaaaaaaaaaaaaaaaaaaaaagagagagaataagatattaaccaaagtcatgtcaaaaccaatcagaagctgatacaaaagctcagcaaaaatcaacggaagcagctggtgagaagcaattggctatatggaactgacaacagtgttgtatatttcattattatttgcaaattatatgccacccatcctttatactagtaaaactcataaacttacatgcatatttacatatgtatatgtatggatttcttttctttttcctgagagctggttgtcaaattttcaccagcacaccactgtctataccttagtatatgccttatgtaaattagagcttcattattttgaagtgcttgaaatagagtctgaatgaaactaaagtccatttgcattattgtatttcaacattacatataaatgaaaagattaaagaatctggattttttagaaatgccaactcataaatttttcaatgtttactaaaaaaaatgcttccaagttttatcaccttcttgtgcaaacaaaatttctccacaacaattatcaaagtcaagcaaaacagaaacaaaaacaaaacccacaccctaacatataaaagttatgttcttggacacaagcactctttaaaaaaaaaaaaaaaaaaaaaaaaaggcaatgttatttcagtaatgttattcaagccgggtgtggtcgctcacacatgtaaccccaaccctttgggatgccaaggcggccaggagttcaagaccagcctgggcaacacagcgagaccgtctctataaaaaatacaaaaattagtgaggtgtggtggctagcacttgtagttccagctacttgggaggctgaggcaggaggatcccttgagcccagtagctcaaggctgtagtgagctatgattgcgctattgcactccagcctggacaagtaaagtttttagagcaagactctgtctctaaaaaataataataataagcaaaaccttgcctctaaaaataataataatcataatgttattcaacacaagttcagtattaactatgctccctaacaccctgtattttattttccttataatttcttttttttttttttcaagactgagttttgctcttgttgcccaggctggagtgcaatggtgtgatctcggctcaccacaacctccgcctcccaggttcaagcaattctcctgcctcagcctcctggtagctgggattacaagcattagccaccacgcccagctcattttgtatttttagtagagatggggtttccccatgttggtcaggctggtctcaaactcccgaactcaggtgatccgcccgcctcagcctcccaaagtgctgggattacaggttacaggcgtgagccaccatccttataatttctatggtagaaacagcacatgcactttcccctagtctcgcctccaaattacccattgcaccctgtggatgccactgtttcctatgtgtgccatgacatggaaggctgaaagcagtgtgacagcaggagggcatgggctctgtataatgggtggccaggagaggcctgaagaagtccgactgtcacaagaactggatgagggagaaggttctcccacaagaatgagggcaagggttcaagttaagctgagaaaggaaagaagggcccaaggcctgtagcatgtgtagatcatgacaataaggaatgtgggcgtctattctaagggtgatggaaaaccactgaaggatgtgaagtgacagtggtgtcatctgcttatcggtatggaagggacaggaccaagagggaaatggccagggttggactcgagatggagggcagaggagggctggagaacatgcatcctggcagtagcccccgggcctcacaggtggagtaggtgactaaggtgagaggaaggcagaggcatggaccactccagggtgtttagcagagccatggggtgtggcttcactgactgtgtggagaaaaccaggtgttgtccagtcatttttggtgggatggacctctgggaacatgaagaacatgactggtggccttgactggagtgttatgttgcacactagtgttctgaaccttccggaaacgtatgagaggggaactaatcctctccactgattgcagtacatagaggcccgcaatccactccacagccgattgctctctatagtgctcaagtgctcttcaggctagagcagcctacttttattttcatttttttacagtttaattgaaaagacaatggagcataggggaaaacaaaccaacccattccccctgccccaaccaacacaagtgcttccattttaccccaagttctagttctttaggcatccagcctatccagatgcctgagtcacaaaaccactcctttccccctcatggtaaggcctgcccatttttctatagagccttcagaatcacgctttcggctataggctatttgactctgtggatgcaccatgattctgaagcttctcccatgctgtttaaaaataaacttcattaaaaaaaaaagaagtaaatggagacaaggtcttgttatgttggtcagtctggtcttgaactccttgcctcaagcgatcctgccaccttggcctcccaaagtgttgggattacaggcgtgagccaccaagctcagcctgtaaataaacttccaagagtaaaattactgggtcacaggacatgagcatgtctatgcctcttgctacataaatagtttccaagagggtgacagtggctctgagctcctgccaacagggtgatgcaggttgttgggggtggggtaggagataggccgggagagataaaacagcaacccgctggcttaacatccagtcttgattacccaccaaggccattctgcccacatgtttttgtgcaaggtatatgttccaggtatcaattacgtcaacatttttctgtccagtaaaatcttggagatcttatgattatgattactttttgtgtgtttggtttttttcttgagacagggtctcgctctatcacccaagctggagtgcagtagcgtgatcttggctcaccctagcctcagcctacacagctcaagcgatcctcccacctcagcctcccgagtagctgggactacaggcacatgccaccagccccacctaatgtttgtgatttctactacagacaaggtgtcactatgttgccaaggttggtctcaaactccttgcctcaagcgatcctcccacctcggtctcccaaagtgctgggattacaggctggagccaccatgcctagccacaattgttgattctaaagtatgtctctacacaggaagaatattggctattgcttctgaaaggcagcttcatgtgcacaaagttgtattttgatcatccccacctgcaactgcagcacagagagatttggaaaagtacaggcagcttttaaacctgcttgtgaatttcagcctaagcacctcttccaaggaagaggctctggaccctgacgtctgggattttgttctacaaccaatttcttcctgttttcccccgagggagcatttagaaatgtgtaaattatgcaatgttgtcttgtaactgctccttgctgacactaaaggaaagactacccttgaaaaagaacagcatttgtgaaaatcaaagttcagtatctacaaactcatctaggggtgtaataccccctagctcctgaaaagtcgagaaggggcttatacatgtttagtacctactaggtactaaatttcctttcaggcactgtttacctttagtaggatagggacgtcctcactttatagagagtattaatagcactgataaatatttgatgtgatttgtccaaggacatataacttggagacggagctgtagagattcgaatccaggtctaattcccaaactcttacatattaaatacttttctttctttccatctttctttctttgggaggaggggagaggaggcttagaggatttctagttgattgttaaacctattcatcaacctactcataagaaatgaaaagcctcccttctccacaagaaaagacctcatcaactggagctgacatggctcaaaggctctagagatgtcagaggccgtgtctggctggggaagggacacgggatcctctgcactccacagcagctcaggcacaaactcccccacttccgaggtggaaaaagacagcagagtccccagctctctacccaaggcgcttgacgggcactgtctaggtggcactggcttcacatgcatcccccttccctctacagtgggcagcagtgttatctccggatgaaagcaaaggctctgagggcagaaggagtcgggctcacagctgtgcagtgccagcgacctaacctcactatgcttcagtttcctgaatcagcccatctataaaatgggataattcttagcacagagtgagcacacagtaagagttgatgctgctgtccttgcaaccatttctgttatggccccaggataaagtccttatagtcccttatagatttacaccaaaggatgtcgagcccttggtttgtgaagtgggactggtaactagattcaatgagatccatgccctgggcttggtgacagaatcaatgatggagttaaaatcctcacttccccccttccaaccgcatggcctcaggaagacaacatcccaaactcatctgtcacaggaagacagtaccagcatcttcatgatcagggtgactaaatggaggctaggcattgtgccaggctctcaacatacctcaagccccacaggatggtatcaccaggtgatggcaacaccagctccatgtcacaagtaaaaagactgaggctcggagacattaagtgatctgctccaaggtcaccaaagtagaagcagctgagaaggacctgaagccttccagctaaggtccagaagctgtgctaagggtagtgtctggcccggcgcacggtctcacacctgtaattccagcactctgggaggccgaagcaggcagatcgcttgagctcaggaatttgagaccagcctgggcaacatggtgaaaccccaactctacaaaaattacaaaaaattagctgggtgtggtagcgtgtgtctgtagtcttagctactcagaaggctgaggtaggaggatcacttgagccggggacgtagaggttgcagtgagccgattgtgccactgcactccagcctgggtgacagagtaagaccccatttcaaaataaaataaaataaaataaaaaggtggggggtgggtggggagtgtctgcccaggcctggagggaggaggcacgtgcaggctcatgtgggcctgaggggttcaccaggccactgggtcctgtcgacggcttctggaatccccaaacctaacggaactgagcgatacacacaggacaggctcagcgcctgggtgcagaccatgccagtatggctccaacagacccctcgaaccatgggaggaatccaaagggctgaaggttggagagagccaagtaaccatcacaggaagggggcttcctccaggggtctggccaaatccagccgcagccacctcaaccccaatactaatcagctaaatgactaagccccactaagcctgaattcttacccccaagcccaactgggtcctcccaggttaggcaatgctacttctgtaatctgaagtcagaaatggacccacatccatttgtaaactggtcactggccctaacagaatgaatggctctctaaataccagcaagaaaacaaccaaccagtctttgcttcaaggggaatgggggtgggggaaatgacaggcaagtcagaccggttacaggaagcactgcgggaaagatcagaccaggatgcctgcaatagtcagaagacagggatgcttatggaggctctggaccctgagaccagagaggcaaggagggagagagggcaggtgatcaggtggggtgcacaaaaaggtcaggagctgactgatgagcagctgagcatggctggagcaggagaggaataagaagggctacctgacccagagcctggggcacaatgtgctcagatgattctttactgactctctcagttgcaagtgagggaaaagtcagctcaaatgggttttatcaagaaaggaaaccacaggctcacttagcttaaaaatttggggcagccaggcgtggggactcacgcctgtcattcatcccagcactttgggaggccaaggtgggtggatcacctgaggtcaggagttcgagaccagcctggccaacatgacaaaaccctgtttctactaaaaatacaaaattagctgggtgtggtggcaggcgcctgtaatcccagcaacttgggaggctgaggcaggagaactgcttgaaaccaggaggcagaggttgcaatgaactgagattgcaccattgcactccagcctgggaggcagagcaagactccatctctgggggagaaaaaaaaaaaaaaagtttaggacaggcttcacctcagaccagccaagccacaaggtcttagtcctctccactcctctgaccaggtcttaatcctggacaggctgcctccaggcagcaaaccccagcagaaaacagctcacatcctcttccattcaagtctccccaacctactccagcaaagtgctacaactttcacaggctctgattgggtcacaggtctgtctctgaaccaatcactgcccaggaagatgcagccccattactggccagtcctacctacattactaaccatccaatgggcatggactggagagaggaaggggcagctctcaggaaaacgaggatgcagagaccaggaggaaggccatgggagctagatgggctctctaccaccaagcctgtgtattattaggtagcatgcatgtgagcacccaggatgcttcaggcacagggccatgttccattcttaaaagccttcctatgcagcattttttacatctttctggaaaaacaaaggctgcaaacctaaccttgtcgaaggttgcaaggtgaatggcagagtcaatggttccaactccattctgcttaagtcctccacccaggagaaagactgtcttctccactatatgccacctaaagagctgagactctatccagccagcaacacgacaccaccagaaaagtcaaacatccctatctgttttcagacacacagaggcaggagactgactaggacactgctgcactagaccccctggaggtccagcttgcaggaagaaggactccaggatggccctaaggtggtctacagagcagtagatcatggcaccaccaacagacacagcacagcatgacaaaggcagagatgaagaaggtgtatccactttggagtgggctgtctagacatccaggcacaggagagagcaagtgtccaggtgccaacgaagctgtggctctgagactacctggggaaagtcttaagggccgaagaccgtgagcagtgctacacaaagccaaaacgcttagggggagcaggcaccactggaaagggttgtgtagagaaaaaagagaccaatgcagcaaggggcaagggaaccaggtaggcagacacccccccactgctaggccttgtcattcattccaagtgcccatggtgagcacagagaacagcgccctaaagagaagacaacctggcgtgacaaacacaacaggcatccttgtgcccaaggacagctcatcttcctaaacagatgatgccacttcctacttcccaacttgagggagcccaccacccgaccagataggaaaccgtgttcacagtgctctcaacacagaagaatcatcaccagggtgatgaggaggtgcccactcggtcacacccctaactccttgttgggctgacagcgtgtccagagaggcaatgcacaagtcttccacataccatccagcacaaataccacctgccaactacaccagaacacctaacgtgccccctccccattccaggccagggttttcaccattttccttcaggtacacagggctgcagcagcctgggggcacatgctgtttctgtctgcacaaaaggtcctgctccttcggaaacacctccctgacttactgtgggcactgccactttcttacaagaccctcccatggcaccccaaaccaagccagagtgtgtctcctgaagtttccggaactggaaactagaaagtaactcctgtctacaacaggtcaaactcaggagctgctgcctttcccaacacatgaagcagcccatccacaagacaggcggacacacagacacacacacatagtgtggaggaccagaaacagaaaagattccctctcccttctctccaccccaatttcaatcccaaacagcacttatttaagctcagctcagtgtttagaggaaggaaaaagctggggagcaaatgcggaggagctcacaggagagcagtgctgaagctttcctgggagaagacaggctcctcattcagaggcccacaagttcaggcacttgcttgcccaccaaccatcaaggtgagaaaatgaaatgcttgagaagctcccttaaggcagaagtgaaggtggaatacccattcacaaaactttccctcacagacgagctgagacttaacatgtggcccgtttccgtcacggccaggcaaaagggggagcagacaccaacatcaggtgcttactgagagcccccccagaaacacaaggtggggttggggaaatggaggctgcaaaagaaagatcacttgactctacccctctccattaaccgaaggggaagaagccaggccaggaaacacaggtacgagtttccggttacccagaggggaggcacagatgagaggaaacaggcaggacaatcagacccaacagatctcccagcctctgcccagggtccacaaattcagagaagctacaggaggggccacagctcttgcctgggtcacagcgcagtctcctcatgaccacaggaggcctggtggggttcaggccacctggaccgcaccacctcccccagcaatgagctccattccaggcagtgactgaagcaccaggagagactgtcaagacagggaggaaaaaacagcaccattcaagactgtctccagcccaggacaggatctgaagctgcagctggccagcacctgcactcggacagcgtgacagcgaggtccccaagggtgactacaggcaaatggagtctgtggtttaaccagaacaagaaggtactcacaactccacgcggtgacctcacaccagccaaaccaccctgttgctactctggaccttacatttcccatttttttccccaaaaactcccattttgccttctggagccaaggcccaactatttggcggtcacatcaggagaggtgatgacatcagtgcacatccatggacactggatccactattcttctcccgttaacaggaccttgatgtctcctgggaacatcccctctattgtgggactgtttgggtggaacccacagcagattcaggggtaagccaatcaactaattcaatcaaactgctaatccaatcaaagctcagagaaggcataaggaaacgtttggtggggcttccagcaaagagtcgggagttcggtgagggaaaatcctgaaactgctgggatggagaggaagacaccctactgtgtgaaggcaacactgcaaaagagggagacagaaaaaccaggtcctcacctgaccgcagacttgcctttgggcctgcatgaccatcagcccctttgtgtctaagctcctgccaccagcacagtgctaacctccctttagggctggacaggccacagaattagtataggaagtaaagacaagtgctgtgcaggcaaccaattaacacggaaggaaacaatgtgaaccaatgaccacccaaaaggataaaactgttcttattttatatcccttcacatcagtatcacgggtctcccactgacagcactgaaaagccagcttgctgactgcttgcctaggcaccatgcaagatgcacctgggaggtgaatggagttgggcagcatctataaagggttctggagggctggcctgcagaacaggagagccgttagctaccatggtaactactacatcaccctggggggaacgaggatgtggccacctctccatgcctaactcaagctgggccaggaacctgatgactagaacgggggacatcaaaacaagtcatcaaggggataagaacttaaacccagtgtgtgcagggggctgcccagagagccaatgtgaccaggagtgtgggtgggaaacagaagagtgcactaccgtgctgaaggcacaagcaggcagtggggctgccagggcctgggagtgctgccagcccactgggctctcggtgtgggccatgggtcacacccacctgagtcctcccagtaactcacccactgctgatgcctgcaccacagaacccccaccagagtcaaggccagccacagccaacgccctataaaaccatgctgtgcacccagcacacgaatacccgagtctccacagcagccacgaggctgacccaccaccagggtgtggcctggacaaagcagcaccctactttctcaccatagcaaatgaaaatctggggggatgtgtgtccaggaatgccatgttttgtcacatgaccaaaaaaggccgaaggatcgctggggacccaggcttcacagatgaagtgacatttgaacagtgtctagggaccatggacaggcagaaatctaagatcaagcgccgccttctctattagggtgaaaaatacctgacgagaaagagaggaaaacacacctcacaccccttcttcagccagttccagagaaagcacagagcattttagtgaccactgtcctcccagtctggcataagagcagtgcacagatgaatccagcataaacagctggacccaggcaagaaaggggagtgcctgcgcagcaagtgcccactggcctctcacatgacaagggaggcagccagcaggtggctgtgttccaaccccagcctcatcccatctagcctccttccagctgtgtccgctgagcctcagtttcctcactagtacctgcctcctgtttaatctacacctgctatgaagattaaatgtgttttgaatgcaggtgaagtgctgaaaaccgctggcacctaggacctgctcagtaacgctgacagccattcccaaaactggccctgtttacagtgagagcaccaagcatttgggcacccacgtgctgtggcagttctagacactaagggagcaacacctgctctcctacttgggcacttcacaatcacatggaaaatgtaaccaacaagacctgttatcagcaggaatataaggtgttaaaatgatgaatggttcctgagggagacggtcttggattaagccaggtaaggtttcagaaaagggaggcagtagggatgacaggaggctcccaactggaggcagcacaaaggtcaaattccaggtgtcacacacatacaggtaaggcctgctctcagagttacactgatgctgttttgatgacaagacagaacttcatttcgaagcatgactggattaggagtaggttctgtcctcgaattttctttaaaacagttactcaaagcacacctgttgttatgtgaagcttccagaaggtttctgatgataaaaatgaaccctcatactcaaaaaggtttggagccactaggctagaggaatttaaagggggaaaagttgtaggaactgggaaggaatggaattcaaaatgtaacatgtgaaaacacttcatgtttgcaagggtacaccttggaagacgcaatggagttcagcttccatgctgggcaccaccgatgtgggaagcggaagactgtcgtagttaagccctctgacatcagaaccacccagtgatggattcagacccaaggcttctggttcccttgtctgcaataccagacaaatcggtgaatctctcctagcccctaaaatgaagatgaagcacctaccctagaagtaattcaaagaagcaatgagacactccacacagtagtgtctggcactgtgtaagtgctcagtaaacagcggctgttcgtcttgcagcctctgctgcccaacagagactgctgctggcacacaggagaccgagcctaactctgcatgcaggggaaacctgatgagccccctgacgttttccaagattcattttcctgcagtggatgaacccaggaaactttgctgcagtcacagtaacatccaaaggcctttaaccccaattgcctggcaatccttgggatgtgagttcccagagggctgctggtacttcacctgacatgacccctctccttttgaataggctccacagagaatcgcagaacctcccggtacttggatggtcacagaatccaaaggcctatacacagaatccaagggcctgggtatgtccacatagccatctcacagtgcccccagactgtgttaagtcagctctgacaataatccaccacttccctaagcacatcacagaactctcaccttccccaccctaggcttgcctccaaaagccacacagagcaaatctaatccagagggtacaacaacaccccaaatactgaaaaccagtgccatgtaatgctaccccaaggcccttcccattttctcaagcccagacaccccaaccatacccacagacacagctcgacatctgcctgtgccccatcccacagcagagagggaaaactgtgcaataatttgccgactgttccttccagctctgttcccctcatgccagagacaacgcaagaagagcctgcctgcctgactacagaacttattctgaaaacctggatgatagaatatacttaagaaagccatctcatattcttaagaattctcaactgttttcaaataaggcacggggagaactgttccatttggacttgagacctgcggcaccatcaggccatccctgactgccgagcccacatgccacggcaccccacccaagctcgttcatgaccatgctctatctgccctcctccctatgaggcgccaagccccttgggcacaggggctgagcatcttcaggtctgtaccctctacacccagcacacgagcacttgctaatcagttagtgactgaaatgtaactgcagtgcctcccaaggcatggaatgtattcagagaaggcctttaaatacagcatgtagaattatcggtatgtctttcttactcaggaaatgcttcccggttcagggaatcccgatggcaaatccacaccctgctctaagagtgaaaagcggctgttttggaaggtgctccaagcatgggtgctagcgagaccacactggaatgaaatgtgctgcctctcctttactcactgtgccacaaacttggccacccattctgacaaccagctcctggtccccaaaggaaccaggcagacgtgggacagcctaccactaggaatacaaaggaaaagcacaacgtgcagtaacaaagcacccagtttccagaaggagatgatagtggggaagtggccaggggacccctcccgctggactggagtcacctggagtcagcctggttaaactagagctccatctgagaagatgctcgcagaccccaaaaccaagaaaaggaaagccaagtgtcctccttcacctaagagaccttggcgcccttaagctacatgtcctatcttacacagctgcccaggggctgacgtgaccatggtgcctttttacatctgtatccagaacaaagcccctgaccacatgctggtcttggacagtcctccagggctctgggacctccaaccaggacaacatattctgaggaccacccagaaacctcagtgaggagagactgtaaagtccactttctcctgagggacagaatgagtcaaagacaaggacatacacctgtgtcacaggtgatacttgctacctttccatttcccgaagtcagagaacaccacgctgctcctctcctgtgtcctggccacaatatacagagtaaagacaggagagtccctgaatctgggcaattgtggatcaggtggcatttacatgtttgggtttagggtcctctactattttggatagggtcagaatcaagagtccttcattttgcaatttacaccattctgcttttctgcagaataaatggcattttaagttaatatcaaaagtgctgtaatgttgaagtagagagcaaactggtcacacagattcatgaaaagttccacatcggttgctagttgccacaccgtggtctggcccaggtttctgtctgtgacagagaccttaagatgttcacgggacaggctatgtcatatcaccaccctgttagatgtaacataggtaaatccagccccaatctgtaatctcacatacacttgtaggggacgttacaggatcctcacacgttttcttaccagctcaaaaatgctgccccctcgtgcctcttccggagccatctctccaactttcaaggcagcgtggtggtgttcagagttgaaaggactctaaggactgtcacttaatgactctgggtaagtccctaactttggttccaccacctcccattaagtcagtaagaaacaaaagcattttatcctctgcttgcccctggagacacccactgagcagcacctattacctgatgctgctggcttctgcacctgcaaaaggggagactggctcccccactcacaaggctgttggggagaagcagaactctctgacagggtgccacacaaactaacaaagcatacaccttggtttagaattttgttagttgagaaacttcacacaatgtaccttgcaaagatatattaaaaaaaaaaaaccccttctagaacaattgacattagtctctgctgtcccttctaggatctgaacttagatctggaaggagctttatggggtgcatacaccagttcccaatcccaccctgtggacaagaaatctgcaggcaaaccaaggtaagcaacatccaaccttccaattcttaggtgggaaaatgatctttcttgctgtgtctctctgcagagtgcctcggtcacctctcccttggtctctgttgcctgaagagctgtgaaaaagaaagcagctcccaaggacgtttcccgctcagagcctggcagctggaggcactgacacacgcggccagggctagttcaagtccctctttgctgcgggaccttctcaggcctctccctggtctgaacacagggcattcacctgcagctagcaagccctgccctgtgcggttattttacttgccatgaggatgcagtacaccgtctactattcgtcggacctttcctctaaaagctaagtttgttaatcatcacttaacatctgtgttcctcacagttctactgagtagcatctcaagccacctgtgattcttccactctccaaagttctgcattagaatattccacgactgaactcttgggcataaagtggtcacaaaggcttcttggtaaaatggggctcaaatgtagctcctcaggcacaggtccaagatggatgctagggttcagtcagtttaagcagcaggtagaaagtgtgcctaatgcttctgctctagagggagaagacaagacaggaaacatccccaagaagcttgcgtgctgcacaggaagataaagctcatacctccacagaacgagtgtcccaggcagatgggaaccgaatcacctgctgaggagactgctcactatgactgctgtgcgagagtaagacacagtccttcactttacccacaatgcagtgagagtaagctggaacaatcatgcacacactgcgcttcggagagattttcaacaccctgggctgaaagggtgcacgacgaaaagaaaagctccaactgctctgaaaaactgttagtagccttttcaaaaggagagtagaggatttactttattactgaattggcagaaattattaactctgagcctgctgctataggaattcaaatgcatactccaggggctaaaagtgagagcacagaaactactttcctcctaagaattcctttgtcaaggagatggttggtaaacacgacttcgtcacttccctaactttccagatacttgtggatattaggtcagttcctgacaccgattttgcaagcaatagctaagtttgttaaccataattgcatgcccataaaggtaagcattacatgacacaattctctgccgcttctctcagaagaggtttaattttagtgttggctcttcaacactgtccccgtttttttttttttcatgagcatcttaaatatgtgtcaactaaatatccagtagtggagttcatcattgggcagggcagagaggagagagcggcacgccggcagcacctgtgctggagccacctgctctcacctgagcccacattgatccaagagaaactgcagacgcactgacatgcccggctctcaccatcacctccgccagcaatcctgtccaccgcggctctgtgtttctgcatggtgtttgctcaaagcaaacggtcctgtcaaatggcccataacagcgctcagagggtcaatcacaaaggaggcactttcctcattgttcatagtcaagaagataacttcccaaatccatccaccccatgttagtaggactctgcccaagatcatcactaaagtccctgaaaataagcggtatgaaatgcaaattccatgccagctaacataaccagggacctatatagcatttctgcatgtgctaagacacacaaaactaagatttgttccatcctcctttcttctgcctcaaggaaccctttagattagaaccctatacaatactggaaactgtgaggtcactggagtgacctaatctacaacactgtgatcgcctgtcaaagtgccgcctgatcccaaagctctctgaggtggcattaaggatcagtgctaatatctcagcaacctctcagactctccagaaggaaagcgagtgcgtgaaattaaaaaaattaccttccggctccacaaaagatgcacaagtcaccaaggctatttttttcatgtcactagttttatcctctaatatttcagtcttaaaattgcagtgacaccagttactgcaaaaaggacattctagaaggttttatatagcttgtgcccactccacccccaaagtcataacaaaaatgtacaatataacatttgttaaagacaattaccatcaagtcaatgttaatgggacctgaataccagggataagagaagtacttatatcacagcaaccagagccttcgaaaaaactcataacccttcagtcttaaccaaaaattgtataagccaatgtgaattattcccaaaacatcatcagagtgaagcatattgctaagagtaatcagccaagctcatgtaaaaatgaaagcaaaaacccctacggtgagagaaacctgagttacctggccaagccaaagatgatatttttcttccattcacagcacattaaaaagtgatctcaatggccacttcctgggaagcagggcctcccctcatacctggatgctactgcatcttcctaccgccctgctcctgccgcgggaagaatgacccctactgccaagaaactcttggagaaaatatgagaatagatcagtcttcccccccacccccccacccccgcaacaacacacacacacacacggaaggggagggggcggtccctccgcaaacagtagcctcagcaaaggggcacccgaggaagcgacactctggagttaaccccgacagtctgggtcaaaaaccaccaggctgagacccccaggtgagggaaagagcctactgaaacagagctcttgggtaaacgggagagaaaagtcctctttaattcactacctaaaaaatggagctctggcttggtcagagacgcaatgggtactgaggcccagaaaggcaacaggaaggatcccaccctccccgagatcatctatcgtcggcagcgaccccaagagggttttggcaaaggcgtgtctagtcacagaagggagacagactctccacgtaccctaggtacccggccaggggcaaaacagactgggggttctctccgaagccaggaaggtgctgccagccgagaggagggggaagaaggacttccctgatcacccaggaggccaagacatgggagacataggttccccgagtcataccccggacaccagttgcttcacagcccttctccctccccttcccgctccgggagggcttcccgggggtctcgggtcccggagggagggcgaggcagagaagcttcgtccagagcagtgagggtcgtagagctggagcagaaagggaggaaaaactctagcctcagctcccccgtctgcttcctccgcccaggccgcacggaagcctcggcctcacgtaccgagcgctgccgggctgcccgacctgcccccggcccgggcccgagaagcgagaggcagggatggcagcggccctcgaggggaggtgggcgccagacgggtcccccgaagcccggtgggcgaggggtacaggagagggggagggtcccgggcccatgcggcctccgtcccagctcgcgcggcgggtacttacgttgctctgggggtcgatggcctgcagcagccggtccctgatctgctgcggagacgccggagccgctgtcattgcctgggcgaggcggggggttgcggccgggccagcgggcgggcgggctgaggcgggggacgggggtcactcactcgccggcctccgggagccggagccgcatgttccccgcggcgccggggggttgggggcgcgcggggtggcggagaggggagccggggccgggtctcggtcccgggccgccgccgccaccaaaggaggaggaggagccgccggagccgccgccgctcgctgccgccgcctcgagaaccaaactccagtgagctgcccccgcgcggagtactctgggtagtccgcgccgcacgcagcgtcggcgccacgctgaggaggttgggagatggggcgggcggagacgccaggcctgggcggggctgcccgtgtgccacgccccgcgcctccgcgcaagcgcgcgcaggcgcactcgtccgcccgtgacgccccgcccagccgcccggcctaggcagccgttgggaggaggttgggcggggcaacggcccccgtccaggtcacggggcggggctttctgacggaagcgcgcgcgcaaagagtccttgaacccggacgctcgcagcggctacctcggggcggggagggcggcgggaaaatccttcctctgggagagccttcccggcgcgtgactgggggacgggagtcgcaggctgagcagctgccgagttttttgtgagggcgagggaaccagacgtccacgttgtgattctgcgcgcagaagggtcatcggagtccgggggtgtcgccgcggcccccccgcccctcagagggtgtgggaatgggtgtggtggcagggcgggggtctgcaccgccacgcgcgaccccgatcgcgaaaacgtgaggcggcaaagcgcctctggcagaagccgcccgccgtagctgggaaagccggaggttgcaaatctgcgtctacgcggcggcttctccacctcggcaccactggcatttgggcgggatcgctctgtcttcggggcgggtcccccgatctgtcggaagttgagcggcatctctggcctccgaagcgccccctcccccaatctgcagtcattgccgccgtcccttgtgggggcacagtccccccgcccccccaccggcagagaaccccgtgattgaaagacccttctacccgcctctgccttgagattctgtaaaactgagatgctcattctcttaaccaaacacgtcacagaggaggaaacggaggcccaaggtcacctagacttcggggttaagcccagaaccgcagatgtcaagtttaagggcgcccctcctccctccaccctgtttattgccttggtaattgctcccctctctctgggagctctgttggaaatgctcttgtgagacgggatggaaaggcaagctcggcggcctcgggagaaatcttttttttcccactgttacaggaagacctagatttaaaacaggaggaagacagctgatgagaaccacatgtgtgccttggagctgcccgacacctgttagtcttgtatttgttgtgcttctgggaaatattttcatttgcaaaaacggctgcttctgcacgtggctatggttgcgtgcttctgcacatgtgaaaagttttacatcacacttggaggagaaaagaaacacgggcaaaacacttgtcatttactgctcccaacctcgcccctcccagaatgcggtgcattgtgtacatggtgtacatggtccaagttggaaactggcccattcggagataattctctcatttctgataagcaaaataagcaaagccttcctcaggcatattctggtcttgcctctctcttaatttctaactcggatgtacagtatctttttttttttttaataaagtattacataggaggcaatttattttgcatgggtcaggttattttaagaaacatttgggccggacgtggtggctcaagcctgtaatcccagcacttcagcaggcggaggtgggcgatcacttgagctcaggagttcgagactagcctggccaacatggtgaaaccccatctctactaaaaatacaaaaattagccgggcatgctggcgcgcacttgtaatcctggctactagagggggctgaggcagaagaattgcttgaacccgggaggcggaggttgcagtgagccaagatcacaccactgcactccagcctgggcaacagactctgtctcaaacaaaatgtggggccagccacggtggctcatgcctggtagctcatgcctgtaatcccagcactttgggaagccgaggtgggcagatcacttgcggtcaggagttcgagacctgcgtggccaaaatagtgaaaccccttctctactgaaaaaacaaaaattagccgggcatggtggcacacacctgtaatcccagctactcagaaggctgaggcacgagaattgtttgaacccagaaggcagaggctgcagtgagctgagatcacgccactgtactccaacctgggtgacagagcaagactgtcttgaaaaataaacaaacatctggaaagtactcaacttacccactttttaaaaactaagaagcactgacatgacttggttcctcaagggcactggctctttttggtatccccagtagatagaaaaatagtatctgtggagtaagtcaatgaaaagtttcatcaaatacacggtagcgttacacacacccccagacatatgaatgcatttcagtttctacagatctggtacaccatgggtctggagagctatttctggaatgaatgaaatacttcataaaatataatactatatacaccaggatacacaacacacacacggatatttagttttattccacatttaatgtacgtaaaagggtgtttttgtaaatgcaaagattaaatcagacagcctctgaattgtagtcttgaaaacattagcaagttcttttaggtccagggtagatactgcagttcacttagccaactttctgcattgagacatccttgccagggatcctgtcagttatgcgaagatgcggcacgagataattcctcttgctgtgatggttcgtcctcaatgacaggtcccttatagtatttaggtacaacaaggtcttttgtgcttggaatgcccttgaaaaagctgcctcacctgtttgtgaagggaaccccaaagagaaagggagaggaagggctgggtgcagtggctcacatctataatcccagcactttgggaggccgaggtgggtggatcatttgaggtaaggagttaagagaccagcctggccaacatggtgaaaccccacctctactaagaatacaaaaattagccgggcatggtggtgggcacctgtattcccagctacttgggaggtagaggcaggagaattgcatgaacctgggaggcagaggttgcagtgagccaagatcacaccaccacactccagcctgggtgacagagcgagactccatcacaaatataaaataaaataaaataaatagaaaaaagggagaggaagtagttcagagtccatgacttgctcttgccatgggaaaaggcaaggaagttagtgtcaggaggtcaagtgcagagcatcttcagccaacctggacagtgagggagtagaaggatgcttctccctggactcactgctgtggcctaagcaggaaccgggatattcaagagcactgcagaggaagccgtgacgaggcaggttcacacagctgtacaggaatagtcttccacagcgacaccttgtaatagccaggagcaacagcaggaatgcgctcatcagacatgtcagaagcaagcccctgagagacaggccatttaaagcacagggttactaaacttaccctaataagggatgtgagggctccagggattaacagaaaaagccagtgtgacaaaaacaaccaccctcctttgacccctatgtttgctttaacaggcgggtggaattttttttttttttttttcgagagagtctcactctgttgccagtctggagtgcagtggcgtgatcttggctcactgcaatctccgcctttcaggttcaagcgattctcctgcctcagcctcccgagtagctgggactacaggcgggtgccaccacacccagctaatttttgtatttttagtagagacagggtttcaccatgttggccaggatggtctcaaactcctgacttcatgatccgcctgccttggcctcccaaagtgctgggattacaggcatgagccaccacacccggccgctggcagaaatttttaaaaccctttctcatatatgaactcattcaaccctatcagttatctcagaagtacctagagatgagtttcatagttctgcttggctttgcactaagtcttgtttactctaaaagtgaaaccaatttaaattggttttgactaaccttgacatgtcaaagataggtagaagacctcaattttttaatcccatcttcaagtagggatggggatacagaaaggttccagttctgaacgcaagccccggaacctggttggggggtgggaattcatgaatacaatactttaattgcactgtacaaacacaacacggctgggacaccaacgaatgaaaaaagtcattaactgtgaacattttttttttttttttttttgaggcagagtctcgctttgttgcccaggctggagtgaaatggtgccatctgggctcacctctacctcttgggttcaagtgattctcgtgcctcagcctcctgagtagctggaattacagttgcatgccaccatgcccagctaatttttgtatttttagtagagatgcggtttcgtcatgttggtcaggctgctctggaactcctgacttcaggtgatccacccgcctcagcctcccaaagtgctgggattacaggcgtgagccaccatgcccggccaactgggagcatttcaataagctcataccctctgaccctgtggatatgagcgtactgaaattcacaacttctaaaagtttatctgaaggaggcaatcagatgtagacaaatgtgtatgtacaaggaagttcactgaagcactatttgtaagagtgaaagattggaagcaatgtaagtgcctagcaataggggagtacgtaaataaactgtgattagttccccacaatgggaaggttatgaattagaaggcgccacagggagccttgtgggtgctacaataatctaagcctcaatgtgagcggtgacctcactggtgtttgtacatgtagaaattcaccaagctggccaggcgcggtggctcacgcctgtaatcccagcactttgggaggcagaagtggatggatcacctgaggtcaggagttcgagaccagcctggctaacatgatgaaaccctgtctctactaaaaatacaaaaattagctaggcaggtggtgcgcgcctgtaatcccagctgctcgggaggctgaggcagaagaatcacttgaacccaggagacagaggttgcagtgagctgagatggtgccattacactccagcctagacaacagagtgagaatctgtctcaaaaaaaaagaaaaaaaaaaaaaaaaaaggaagaaattcaccaagttgtacactgctgtaaattaaacttccaaagtaaattaagtgtgtgcgtgtgtgtgtgatgttgtcactaagaaaacctgtattgagctgggcacagtggctcacgcctgcagtcctaactactgggaggctgagacggttgaacccaggagtttgaagctgcagtgagctacaactgtgccactacactctggcctgggtgacagagcaagatcccgtctcttacaacaaaaataaagccactattgatggagaaacgctcccaataaataataaaatgcagcatataaactatatacattgtgatcttaattatacttttattaaaatatacatacttatgcacagagtgaatagaaaaaatattggaaggaaaccaaaatattgacagcagttatctctgatagatagaatgacagatgatgtttattttcttcttacactttttcctagattagttctgcattttccggcattcatatgtattgtttcccagccatcctgtcaagcgctgggattgttctgatctctgggagcctccagggctgactccagtatggctaatctaaagtgagcttgtaatctccaaaatcctgatggtggcttttctattaggcagactaatagattcagatataggtcccaacagtttgtgttttccttactgtcccagttttatatcattattcttagtactaaacagagtgacaacagggagtgacatttgttgaggacctacgatgtgtcagggtccatgctggggacttcacatgagggctccatgaagcccccttggacactcaggtccttgtgtcatccccacttcccgcccgccactgacgctggggtgaacctgcaactcactgtgactaagagaatgcagtggaaaccatgctctacccagtccaggctaaagctttaaggaggcctggaagttaccacacagcccagcaattctactcctaggaatctccctcaagaaaactgaaaacatggctgcgtgcagtggctcacacctgtaatcccagcactttgaaaggctgaggtaggcgggtcacttgagctcaggagtttgagaccagcgtagccaacatggcaaaaccctgtctgtactaaaaatacaaaaaattagggaggtgtggtggtggatgcctggagtctcagctatttgggaggctgaggtaggagaaccacttgaatccaggaggtggaggttgcagtaagccaagatcgtgccactgcactccagcctgggcaacagactgagactctgtcttaaaaaaaaaaaaaaaaaaaaaaaaaaggcaagaaaactgaaaacatatactcacagaaagacgtgcgtacatgtaaatgtccatagcagcactgctcataatagccataacgtgcagacaacctgccccacctgggttcctagccagccttctttctcaccactcttgagtgggtcttctcatacctgtcccactgggcacccaagcatgcaaccaagtgacgtggtcttcgtgcctcaaaggagtgacccagccaaagtcatgtggctgggatttggggctggctaaagagtccagcccgtggccgggcacagtggctcatgcctataatcctagcactctgggaggctgaggcaggtggatcacttgaggccaggagtttgagaccagcctggccaagatggcaaaaccccatccctcctaaaaaaaaaaaaaaaaaattaggcatggtggtacatgcctgtaatcccagctactcaggaggctgaggcaggagaatcacgcgaacctgggaggcggaggttgcagtgagctgacaagacagtacagcactctagcctgggtgacagagtgagacaccatctcaaaaaaaaaaaaaaaaaagtccagcccagagctcagggttcccagactctgaaccaaatcaagtataagccatttccccaaagagcagacaggagaggaccaaggtgctgatgtccaaaaccaactaggagggtggatctgaaggaaaaaaacaacaaactcaccctagccaatggagcttcccagaaacaaaggtgcagagttgtgccccaacacagaaggcaacatcaagagagtagccaggtgcagtggctcacgccagtaatctcagcactttgagaggccgaggcgggcggatcacttgaggtcaggagtttgagaccagcctggccaacatggtgaaatcccatctctaagagaacgacaaaaaatttagctgggcctggtggcaggcgcctgtaatcccagctacttgggaagctgaggcaggagagtcgcttaaacctgggagggagaggttgcaatgggcccagattgtaccactgcaatccagcctgggcaacagagcaagaccctgtctcaaaaaaaaaaaaaaaaatatatatatatatatatatatatgtatgtatacacaatttgaccctgtgttagcagagtacttgcccctactcccctaaatgtccccatcccaatccccagaacctgtaaatatgtcatggcaagggataattaagggtacaggtgaaattaacataactcatcaactgactgctggattctcctggtggccccaatggagtcacaagcgtccttaaatggggaagaaagaggtagaggagtcagaattaggagacagggtgtcatgaggaagacttgacaggctattggttgcctggaagatggaggaagaggccgtgaaccaaggatgtgggcagcctctaaaagctggagaaggcgaggaaaatttctccctgagagcctccagaaggaaccagctatgcggacacattgatgctagcctacagagacccattctgtacttttgacttccagaattgtaaagaataaatttgtggaatttttttttttgagagtctcactctgtcacccaggctggagtacagtggtatgacctcgactcactgcaacctctgcctcccgggttcaagcgattctcctgcctcagcttcccatgtagctggaattacaggcatgcgccaccacacccagctaagtttttgtatttttagtagagacaaggtctcaccatgttagccagactaaatttgttttgtttgacaccacgaagtttgtggttattttttacagtggcaagaggacacgaatacggctttaaagaaaaagctagccaggcacaatggcccatgcctataatcctggcactttgggaggctgaggtgggaggactgcttgagcctgggagttcaagaccagcctgggcaacatagtgagaccccatctctacaaaaaaaataaaaaaatagctgggtgtggtagcatgtgcctgtagtcccagctactcaggaggctgatgtgggaggacagcttgagctcaggaggtttaggctgcagtgagctaagatagtgccactgcactccagcttcagctacagagcaagaccctgtctctaaaaatataaagaaagaaaatttaaaagtaaagaaaaagtggatcattcggtcctttaagatgtggcactgcccaattagaactttcctccatgcaatgcaattacagtcactgaggcactggattttctagttttatttaactaagacggagactgaaacagccacacgtggctcctggctactgtgctgctgaacacaggccctcactactcaaaagtgtggtccgtggaccagcagtattagcattaccagggagctccttaggaacataggtccttgatcaggtgtggtggctcacacctataaccccagcactttgggaggccaaggcaggaggatcacttgagcccaggagttcaagaccagcctgggcaacatagtgaaacctcgtctctacaaaaaaatacattagccagctgtggtggtatgtgcctgtagtcccaggaggctgaggtgggaggatcgcttgagcctgggggaggttgaggctacattgagccatgatcgcctcacctgggtgacaaagtgagactgtgtctcaaaaaagaaaaagaaaagaaatgtaggcccttagcctgtacctccccagcctgttaggcagaatctgaattccacaaaaacacccccaagggatttaggaggatgttgaaatctgagaccctcccatggttgaggccaccagtcacttacacacaaatgccttcctctgcagcaccaggagacagagcccatcacagaacttctcagggtgcctcctacaccacactagctttgtgtgtttgttctttaatgcctcaaggcatactactagccaaggagagtaactaacagcagctgttgaacactatgggtcagactttgaccatctgttatggactgaattgtgtcacctacccatgactaaattcatatgctgaagctctgacctccaacagggactgtatttggagacagggcctttgggaggtaattaaggttaaataaggtcataagggtggggtgataagctgacaaaagggaggctggttgtggtggctcacgcctgtaatcccagcactttgggaggcagaggtgggtggatcacttgaggttagcagttcaaaaccaacctggccaacgtggtgaaaccccacctctactaaaaaaaaaaaaattacaaaaattagccaggcgtggtggtacgcacctgtaatctcagctactcaggaggctgaggcaggaagaatcacttaaagccggaggcggaggttgcagtaagctgggatcacgccactgcactccagcctggatgacagagattctgtctcaaaagaaccgtgaggcaattaaacctcttttcttttttctttttttttttttttttttgagacagagcttcactcttgctgcacaggctggagtgcaatggcacgatctcggctcactgcaacccctgcctcccgggttcaggtgattttcctgcctcagactcctgagtagctggatttacaggtgcccgccaccatgcccggctaatttttgtaattttttttagtagagacagggtttcaccacattggccaggctggccttgaactcctgacctcaggtgatccacccacctcagcctccctaagtgttgggattacaggcatgagccaccgtgcctggccattaacctcttttcttataaattacccatttctttatagcaatgcaagatggcctaatacacagctctagctgactaatataccaccatctcactgaaggcttgcaaaacccagctgagaaagtcttttaataaaagcaacaacattaataaaaacagtgacaactactgagtggctgcccagcatcaggcatgttataggcccatatcaagactgtctccttcactgtacccatatcacagatgaggacgtggaggtgcagaagggccaagacacagaacccaggtctgagctacacctccaacttgctttctgctgcaaccaccttttccaccttctttctcatgcacacaatgtactctaattagatgtaaagctttatttcccctaacatttccacagttcccttggcacagtccacactcttttgcctaggtttaccaccaactgccaagataataatgtaaactagacaccaatgaacaggaaacaggatccactagtaagatgtcatttttttttttttttttttgagacggagtcttgctctgtcgcccaggctggagtgcagtggcgtgatctcggctcactgcaagctccgcccccccaggttcacgccattctcctgcctcagcctcccgagtagctgggattataggcgcccaccacctcgcccggctaattttttgtatttttagtagagacggggtttcaccgtgttagccaggatggtctcgatctcctgacctcatgatctgcccgcctccgcctcccaaagtgctgggattacaggcgtgagccactgcgcccggtcataagatgtcatttttaaaaaactgtctagtccagagatcagtaaacttttccataaagggtcagaaagtaaataggttcagctttgcaggctgaatggtttctgttgcaaggactcaatcctgcccttatagtgctaaaggagccaaggatgatatacaaactaatgagcacaacagctgatataatttgcctgtgtccccacccaaatctcatcttgagttgtagttcccataatccccatgtgtggtggcagagacctgggggcaggtaactgaatcatggggtggttcccccatgctattctagtgatagtaagttctcacgagatctgatgtttttataaggggcatccacttcactcagctctcattcttctcctacctgccaccatgggtagaaggatatgtttgtttccccatccgccatgactgtaagtttcctggggtctccccagccgtgcataactgtgagtcaattaaacctcttttgtttataaattacccagtctcaggcaatctttcggttttttgtttttttttttttgagatggagttttgctcttgttgcccaggctggagtgcaatggctcaatctcagctcaatgcaacctccactttccgggttcaagcgattctcctgcctcagcctcctgagtatctgggattacaggcacccgtcaccacgcccagctaatttttgtgttttttagcagcagcacgatctctgctcactgcaacctctgcctcccaggttcaagcgattctcctgtcagccttccaagtagctgggattacaggtacgtgccaccacgcctggctaatttttgtatttttagtagagatggggtttcaccatgttggccaggctggtctcgaacttctgggattacaggcatgagcctccctgcccggccctttttatccttctttttctttttatagcatgccttttccttttacacaaacagcatccgtctttcatcaacataggaaaacatcaggaggcctgtcaaatatttcataaactcaaatttggtaaaggatataatgaaatggttgaaatgaaaagaaaatgccttgctaatgacagcttcgctggcttttcaaatctaaccacttcagaagagagcagatctcattatccaacatcgcactgctgctgttctgctgttctgaggagtctcagggagcctgagaggggtctttcgtctaactatcaagagaaagaggccagttgcagcagctcacgcctgtaatcccaaaacttcaggaggctgaggtgggcggatcacctgaggtcaggagttcgagaccagcctggccaacatggagaaaccccatctctactaaaaataccaacattatccaggcgtggtggtgggtgcctgtagtcccagctacttgggaggctgaggcaagaaaatcgcttgaacccgggaggcggaggctgcagtgagctgagattgcgccactgcactccagcctgggtgacagagtctcaaaaaaagaaagaaagaaagaaagaaaactgggttttggtcaattgattaaccacacttgaaaatgggagggaagatttctagcaaatttaaaaaatgtgtttgtgtatatgtttgttaaaatgcaggccacaagggtacagatgattccctgagtggctttgggagggaagggacaccttgggattctccatcacaccctagttgagcggttggcaaatttttctggtaagaggccaaacaggtgacattttccattctgcaggccatatggtctctgtgccactactccactttgaagttatagtatggaggttgctaaagcaattctaagtaatacacacacaaaggggtgtggccagattctaatacaactttttttttttttttttttgagatggagtttcactcttgtggcccaggctggagtgcaatggtgcaatctcggttcatcacaacctctgcttcccaggttcaagtgattctcctgcctcagcctccctagtaactgggattacaggcctgtaccaccacactcggctaattttgcatttttagtagagacagcatttctccatgttggccaggctggtctcgaactcccaacctcaggtgatccgcccaccttggcctcccaaagtgctaggattacaggcgtgagccactgtgcccggtcccagtacaactttttcttttggagacagtctagctctgtcgtccaggctggagtgcagtggaaaaatctcggctcactgcaacctccacctcctgggttcaagcaattctcctgcctcagcctcctgagtagcttggactataagcgtgcagcacgacacccggctagtttttgtatttttagtagagaaaggattttgccacagcggtcaggctaataagggatcgcctggctcagcttcccaaagtgtggggattacagttgtgagccaccgcacccggctccaataaaactttatttacaaaaacaagccgtgggccagacatgccctctgggctgtagtttgctgactcctgccctagagcagatgtacatgaagggcaatgagaagcgcgtgcaaaaatacattctccttcaatgtgcaatggtggaggaagcaaaatgggttccaacatgaaccccaagtgaacactcccagggtaggtgctgtacattgtggccttctctgcattcaccacccacagcttatcacttcggcagtgactcccagcctgtagccttgttttctaatacacaaaatctgaacacaaaccaagtgcccatcaactggggactggttaaattaatcatggtatgtctttacaatggcgtatttgcagttattaagaatcatattgtgattgagcacggtggctcatgcctgtaatcccagcactttgggaagccaaggtgggtgggtcacttgagggcagaagtttgagaccagcctggccaacatggtgaaaccctgtctccagtaaaaatacaaaaattagctgggcaggcacctgtaatcccagctattcaggaggctgaggcatgagaattgcttgaacctgggaggtggaggttgcagtgaaccaagatcacaccaccgcactccagcctgggcgagagtgagactgtctcaaacaaacaaaaaagaatgatattgtggttcatgcctgtaatcccagaaatactggaggccaaggtgggaggttcgttgagcccaggagtttgagagcagtttgagcaacacagggagaccctgtctctcccaaaaaataaaaataaaaaaataattagcctgtggtacatgcctgtggtcctaggtacttgggagactgaggtgggaggatcgtggctacagtgagctctcatcacgccaccacactccagccttggcaacagagtgagaccttatcttttttttttttttttttgagacagagtctcactctgtcacccaggctgcagtgcagcggcgcgatcatggctcactgcgacctccacctcccaagttcaagagattctcctgcgtcagcctcctgagtagctgggattacaggcgtgcgccaccacacctggctaatttttgtatttttagtagagacggggtttcatcgaactcctgacctcgtgatccacccgcctcggcctcccaaagtgctgggattacaggcgtgaaccaccgcacctggccaagtgagactctgtctctaaaaaaagaaaaaaaaagttattttagaaaacaacacatttgaggatatggaagtatggttacagtatcaggtgagaaaaccatgctggaagatactaagataacactgccaaaagaaaatgtaagcaccacacctagatgattatgcacagaagaaaggttggaagaatatgtacctagggtgatggtctccggagaatgtgactatgggtgatttatttttcctcttctagcaagtatgcatttgataagtttcttcaatgaatatgcattagtagtttaaaaaaaatttttcttttttgagacaggggtctcactgtgtcactcaggctgaagtgcaccactcggctcactgtaacctccgcctcccgagttcaagtgattcctctacctcagtctcctgagtagctgggactacaggcatgtgccactatgcccagctaatatatgtatgtttagtagagatagggtttcaccatattggccaggctggtattgaactcctggcctcaagtgatctacccacctcagcctcctaaagtgctgggattacaggcatgagccaccgtaccaggcctaaaaaattttttcaagcaaagtaaaacaaacaaaagccacttaaagccacaccaatggtatttaaggatattatggacccctccatggttatctgcccaaggaagctaatgccacaatagaagccaatgaagatcacaacactggtgccaggggcagccctgatcacagtggacaaaatataatccaagtccagcaacaaggtggctaaggacctatttactgacactgcaccgtaagtaaaaatgagaactgtaacacctcctagcaacaaagcaagtgtaaagaaaatgatgctgaaatgaacacagcagaactcatccttccttatccactctcaaaacatacatacaggaatatggaaaatgctgcatggggatggtgaagacaggaaaaggtttaccaggctggaaattgtttgcgttttttttttttttttttttttttgagatgttttgctcgtcgcctaggctggagtgcaatggcgcgatctcggctcgctgcaacctccgcctccctggttcaagtgattatcctgcctcagcctcctgagtagctgggattacaggcgcacgccaccacacctggctaatttttgtattttttagtagagacggggttttgtcatgttggccaggttggtctcgaactcctgaccacaggtgacctgcccactttggcctcccaaaatgctgggattgcagggtgtgagcctctcactgcactcagtctgtttgtaacttttttttttttttccgagacagaagatcttgctctgtcacccaggctggagtgcactggcacgatctcagctcactgcaacctccacctcctgggtttttaagcaattctctgcctcagcctcctgagtagctgggattacagggggcatgccaccacacccagctaatttttgcatttttagtagagacggggtttcaccatcttggccaggctgttcttgaactcctgacctcgtgatccacctgcctcggcctcccaaagtgctgggagccaccgcgctggcctctgtttgcaattcgtaaaaatgctgtcatcagcctttaatggtgtgtgtgcagactgcacaaagaaaagtggatgagaagacagaaaacacacacggtgatgatacccacagcaacaggtgctctcaggcactcagccgcattcgagttcattgaaacttacaacaaccttaggcacacactacttgcaggccgattttagagatgtggaaactgaggcttggagaggagaaagcaattagccaaggtccctctcagaatgagctgagatgggatttgtactcacacctaactgacccagaacattagtgcttaaacactgtgagacactaggcacccaaacttcaaactctgataacctctggtgccagtaaagttcttgaaaagcttccttaagagacacaaccatgagattccatttttaaaatgtacagcagccaccaaccagcatctgaaaaagccacgctgctattattaacaatgagacaacagttctctggagaaaaagaggactattgaaacaaaacctcaatgacaggattctcttctgagagcacgattcatccccataatggacaaatgcctcgcctcattgagacctccgcgccagtctgaataaggcaggaaggtttcttcacaccattcatctggcctgtgagggacccagccaagatcttggcgtgcctgttctgacagcgacaccggcctcagcaaagccagacccagcagctccgatctctgctacttacagaccttggggtgatgcttggctgagatttggcaaggaaatgaattgcagaagtgatcaaggagaattccacaacctgagaggcagcaaaagtggacttgaccctggtctagcaagagcccaccattagcaatgactctttcaatactttcaggagcagctccagtcaaaattccacttactcaattctttttttttttttttttttgagacagaatctcattgtctcacccaggctgaagtgcagtggctcaatctcagctcactgcaacctccgcctcccagatttaagcaattcttgtgcctcagccacccgagtagctgggattataggcgtgtgccaccatatctggctaatttttctatttttagtagagatgcgatttcaccatgttggccaggctagtttcgaactcctgacctcaagtgatccgcctacctcggcctcccaaagtgctgggattacaggtatgagccactgcgcgcagccccacttgcccaattcttgaccatcatttattgagctaaatccaaaaaggaaactctaccactgactcttttctttctcatggcctccaaaatgaatcctaggtttttccagcagggtaaattcaaaaggactcaggttggaaattgacttcttggttaaaaaaaaaaaaaaagtataaacaaaaggtcctttttagaaatgaggtttattttcaaggctactcagtcctaaaagcctgcatatttactttttttccttcctccaggtttacctccaagtcaggatttcaaaaaccaccaacattcaggctcattcttattggtataaacaaacaaacaaaaaaaccagacaacaaaaaactcaacaagcaaatcacacagttgtgggattcagcgccaaccccgggcgtttcattttggcaacaaaaccaggattccctttcaaagaagcttctggaaaatgctgtatttcctagatgaaggcccctggtttttcaacctcaaaatcacctactcaaaaagcagactcagaaacccaaggttttagaacatggtcccaatgtaccacatcataaaatcactctcattcctgcaactgtacaatgaatggctcccaaagtcattttatttaacaaaggggtcaaggcagaggaaagtttcccttaatatccccacaactgctccacatgtcttctgtggaaacacttcaccaggaactagctcaacactcttgctaacaatttagtgtctatacaggaaggctggtgtctctgttacaggtggcccgttccttaaagcctttagggttaatcgcagctgcactgagtggccaagcagaccctgttgggatgtgaaagcagtttgttaacagggcccctggccgggcccagaggctgtcagactcagcaagtaacactgaatgtccaaaaatacggctgtgttaaactaacaagccaatccttctgctcagatctctggatagaaatgatttttcttttatctatggggaatgcaatttcatcacagccccttacataaacgctcctgaaaccctttcagtagacagcatttcaattcagagaccaaagtgaaactatctttgaaaacagggacgtggctgggaaaccatgcacacctcggcgaacacttttccacccaccacgagcttggactttctgggaaggttgtcggttttctggtcaaaaacattcttgaagtcatcaggaatggaggaatggagactcggcatcccgggaaagtgagttcctggtttcatcgctgggattcaagagccgaacagcctggagaagtcagagggcagaaatgtctgtgaggataggaggtgactgttctaaaaatattgtcagcgattattttacatgactattacctattacttagatgattttacatgattgtctgattttttaaagtaacctgtgatccacctgtgaatataattaacaatactgaactacacagttaaaagaagaatatactctttttttttttttagacagagtctggctctgccgcccaggctggagtacagtggtgcgatctcagctcgctgcaacctctgcatccgagattcaagcgattctcctgcctcaacctgctgagtagctgcaattacaggcgcctgccaccaagccagattaatttttgtatttttagtagaaatggggtttcaccatgttggctgggctggtttcgaactcctgacctcaagtgatccacccgcctcagcctcccaaagtgctgggattacaggcgtgagccactccgcacagccaacaccaccaccctataagggaaagcggtacagctgttaaacaaaagatatatacaggaactttcggtattatctttgcaacatttccacaaatctaaactcattccaaaataaaaaggttatctgaaaaaaataagagtgcagaaacagctggatttccacatgcaaaagaataaagttggacccctgctttatgtcatataaaaaaattcactcaaaataggtcacagacctaactatcctccagaatccaaactacaaaactcttggaagaaaacttacgtgtacatctttgtaaccttgggttacacaatgatttcttactataatacccaaagcacaagtgacaaaaagacaaaaacataaactcaacttcatcacagttaaaaacttttttttttttgagatggactctcactctgttgctcagggtggagtgccgtggggcgatctcggctcactacaacctctgactcctgggttcaagcgattctcatgcctcagcctcccgagtagctgggattacaggcacccgccaccatgcctggctaatttttgtacttctagtagagacggtgtttcaccatgttggtcaggccggtctcaaactcctgacctcaagtgatccaaccgcctcagcctcccaaagtgctgggtttacaggcatgagccaccatgcctggccattcacaataaaaaacttttgtgcttaaaatgacaccatcaagaaagtgaaaagacaacatacaaaatgggagaaaatgcttgcaaaatacgcacgtgataatggactgataacgagaatacacaaagaacccttatggatcagcaataacccaatttttaaaaagggcagagaatcttaagaagacatttcctcaaaggaggtggacaaatggccaataggtacatgaaaatatgttcaatatcattaaccatcagggaaatgtgaatcaaaaccttcgaactggctgtgcacagtggctcatgcctgtaatcccagcactttaggaggctgaggtgggtggatcacttgagcccaggagttctggaccagcctgggcaacatagcgaaacccagtacttcttgtagagacaagaagtacaaaaattagccaggtgtggtagtgcacacccatagtcccactacttaggacgctgaggccagaggatcacttgagcccaggaggcaaaagttgcagtgagctgagattgtgccactgtactccagctccagcctgcgcaacagagtgagactctgtttcaaaaacaaacaaaaaactttcatacctactaggatgaccacagtcaaaagattaacggtaacagagttggcaaggatacggagaaagtgtaaccctcgtaggctgcaggtaggaatgtaaaatgtcgtagctactttggaaaacactctggtgttttctcaaaaggataaacacaggtcggctttaatctcagcactttgggaggttgaggtgggtggatcacttgaggtctggagttcgagaccagcctggccaacgtggtaaaaccctgtttcagccaggcgcagtggttcacgcctataatcccagcactttgggaggccgatgtgggtggatcatgaggtcaggaattcaagaccagcttggacaacatggtgaaaccccgtctctactaaaaatacaaaaaattaggcatggtggtgcacacctgtaaccccagttactcaggaggctgaggcaggagaatcacttgaacccgggaggtggaggttgcagtgagctgagaacgtgccactgcactccagccttggcaacagagcgagactctgtctccaaaaaaaagaaaattataaacgtagtgtgatcatataacccagcaatttcactcctatatagctcataactaaaaacataaatctgtacaaaaacttgtacatgaatgttcttgtcaccactttcataatagctaaaaaatacaaacatttcaactgtccaccaactgacagatggaaaactggggaatagtcatacaagagaatgattctgccatgaaaaggaatgaagcactgctccaggctacaacgtggatgaacctcaaaaacatgatgctgagtgagaggagctagacacaaaaggccatgcagtgtatgactccatttatataaactgtccacatgaggcaaatccacagagacaggaagccgacgagtggttgccagggactaagggaggggaaatggggcgtgactgccaatggggacgcggtttctttctgtgttgatgaaaatgttctgaaattggatagagatagcggctgcataatcctgtgaatattctataaaataccggattgtgaagacagacttccgccttttacttgtaaaacctctccatggttcattttctccctaacttttcctcttgttattttatgaaaatttcaacacacagaagagttgtgttgaaacacactgccaccacctacattctgcaattaacactttgctgtaccacatacctatccatctatctaaccatttatccgtatttttgatgtgtttcaatgtaagttatagatgacagtgctactgatccctaaatactcagggacgtttctcccctatttcagacttttcataacttcttaaactttccaaagctcaaacaacacaagagtgggcacagggagattgggcacggtggctcacgcctataatcccagcactttgggaggccgaggcaggtgaatcatttgaggtcaggagttcgagaccagcctggtcaacaggatgaaatctcatctctaccaaaaatagaaaaattagccaagtgtggtggtgcgtgcctgtagtctcagctccttgggaggctgaggcaggagaatcacttgaacctgggagatgcaggatgcagtgagctgagactgtgccactgcactccagtctgggtgacagagcaagactccacctcaaaaaaaaaaaaaaaaagaagaaataggcacacggaatattgaaccatgcccaggctctgccaatttcctcagcaactgccacagggtcacctctctaccccatctggagtggatccttccaactccctggctaaacagtgtttcactcccatacttaaggcactcatttaaggtttatccatggttactgcatgcacattacacagctgaagttaggctgcacagacatagtaccctccggccttcttcactttcagaacgtttcatttccccatgcagacagaaccttctggcacatcatcagtgatggtattgtgacagccagtcacatgggcatccttcaagttacctgatccttcccctgttcttggacacttaggtgatttccagtttttaaatatcctgggaaagccagtcactacctccctgagagggccctttcttgagagaatcttctctcacccatggcccccagtgaaagagttggcctgggtcagaggttggcacattttctctgtaatgggtgactgtttactaacagttctggctctgcaagccatgtcatctctgtcacacaactcaactccaccgctgtgacacagaagcagccacacacatgaacttttgcgaagttcattcacaaaaacaggcagtggggagatttggcctgtggtctgatgacccttgacctaagtggttatggcagaatcaagaacccccaccccaaatggaccagagtgacaccaaggtgggtcaatcagactctgccccaggaaacaaaatcaggaccctgggctactgactatgcaggtcttggaaagttgagctgggaggatgcccgaggctgctgttctggtcacagactagcagatgagggagtgaagatgctggtcaaacaggagaggatgatgaagcaggtgcacaggaaagacgagaatgagagaagcacactgacttcttccctgccccaggacctttgcaaagatgagaatgagaaccatgctgacttcttccctgccccaggacctttgcaaagacgagaatgagagaagcatgctgacttcttccctgccccaggacctttgcaaagatgagaatgagaagcatgctgacttcttccctgccccaggacctttgcaaagatgagaatgagaagcatgctgacttcttccctgccccaggacctttgcaaagacgagaatgagagaagcatagaagcatagtgacttcttccctgccccaggacctttgcaaagacgagaatgagggaagcatgctgacttcttcccttccccaggacctttgcaaagacgagaatgagggaagcatgctgatttcttccctgtcccaggacctttgcaaagacgagaatgagggaagaatgctgacttcttccctgccccaggacctttgcacatgccacttcctgtgccaccatgcttttctccagctctgcaaatggcaaacgtcttcttgtcctttaggtcttgatttattattatttgtttggagacagggtcttcttctgttgcccaggctggagtgcagtggcaggatctcagctcactgcaacctctgcctccagggctcaagtgattctcccacctcagcctcccgaggagctggaactataggcaggcgccactacactcggctaatttttttatttttggtaaagacagggtttcaccatgctgcccaggctggtcttgaactcctgggctcaagcaattctcccaccttggcctcccaaagtactgggattacaggcctgagccactgcccctggccgttcctacaatttcatgtaagttccttgatctcctcacaagccttctttgttcctaggcaagtctcatacatgctctcagatcctctctgccaggtaggataccttggcaacagtcttcctgggaatacatcacggtccttgtgatgagggtgaaatgccatcctccccagatctcctatgtcctggaagcatcttcgcaaacagccactggggtggcacgcagactggacagcaaccccacattcggagtctcaatcactcaggacagacaactttttgtcctctctctttctgggggaagcatacagggatggacccacagaggccaagaacaccagattctcccgtcgtgtcttttcctaaatccatttacagcaaatctcacaattcgttaacagtagtatcagagttatggccccagtgctagatggaaaggcaatctgcttgagttttctcagcctaatgagaaaatgaaaagccagaatttaaaacaataaagtctgaatacatttctactggcttccagcccaggtggagcaggatctggcagtgtgctggacatttaaaccatattttccacctcggcagatgcagaagaactggtgagacgtgacagggccatgggctcagggacggcatctcctggcagcccctgcagaggtgccgggcatagccgggggctggagaactccatgttccaataaaagttccagcccggtttggtggggacacagggacagagtttaaccccttcagatactggttccctcacttacttattttgaaaacagaaagcagggccgggtgtggtagctcacatctgtaatctcagcactttgggaggccgaggcaggtggatcacatgaggtcaggagttcaagaccagcctgaccaacatgatgaaaccctgtctcttgtaaaaatacaaaaattagccaggtgtggtggtgggcacctgtaatcccagctactcgggaggctgaggcaggagaatcgcttgaagcagggaggcagaggttgcagtgagccgagatcacgccactgcactccagcctgggcaacagagcaagactcgatctcaaaaacaaaaacaaacaaacaaaaaaaacagggccgtgcacagtggctcactcctgtaatcccagcactttgggagcccaaggtggacgaatcacaaggtcaggagatcaagaccatcctggataacacgatggaaccccgtctctactaaaaatacaaaaaatcagccgtgtgtggtggcacgcacctgtagtcccagttactcgggaggctgaggcaggagaatcgcttagacctaagaggccgaggttgcagtgagcccagatcgcaccactgcactccagtttaggcgacagagcaagattccatctcaaacaaaacaaaaaataaagaaaacagaaaccaggatacaagagtgatgactgaaaagacagagaatgaccatcaggtgggtcaccctggagaaggagactaagagacgacagtgaaaggaaagggcaggctggactcacacaatcatgcagaacatcatgaagatgttccacagggcgatgaagattcgaaagtatctgaggctcagcaagaattcccggatgttgtcacctggaagaatcagaaagcacttttatggcacagctaacatcccatccctactgccacctcagcagtggatttttgtgacttccacccacccggcgcttgctgcctccaacttcggcaacagtgtggcttttccttttggtttctccctcttccctaccctcatcaggctgtgtctaccactgaccaatcccctgaaagcaccaagcccctctgcctctgattggctcaagaaggggcatgtgacccaagtctgtccaatgagagtccaccctgggacttttcccccaactactgggaaagagataccttctgccaggcttactgagctgggaagatgtaagctcagtaagctcagtgcccacaggccaaatccagcagcctcttccacctgtttttggatggcctatgagctaatagtttttacttttttttaaaatataaagatggggttttgctatgttccccaggtgggtcttgaactcctggcttcaagtgatcctcccgcctaagcctctcaaagtgttgagattacaggcatgagtctccatacccggctggtttttacattaaaaaaaaaagaaagaagactattttgtgagacacaaaaattacaagaaattcaaatctcagtgtcaatgaataaagttttatggcacacagccatacccattcatttacatatcatgtcctgctgcttttgtactacaacagcagagctgagtcacattgttgtgccagacagacaccatatggcccgcaaagccctcagatatttactatgtggccctctacagaaaaacatgccaacccctgctctggggtcatctttgccaaccctaaccagtctcacagtaaaaccaacataaaagaaaggggaattgagagctgcagagagtcagatactgactctaaccctaaccctaaccccaactccaaccccaaccctaatcttgaaggactggtttgacacctaaacccagggtgcctgaaaacaattctgttggatgtttcaatttgctttaaccactttgagctgggtttgcagtgtttgtaactgaaagcatcctaattcaggcaagtgaaagggaaggtgtttcttggtgatgacttactctggtccccttgaatgccaaggaacagaaacccctccgagggaaggcaatttagtacgtgaagactccagagacctgggttctagacccttcttccagggtttccagtcaatcactctccctctcaagccctccagaatgaaaagaatgggtccagattaggccaggcatggtggctcacacttgtaatcccagcacttcaggaggccgaggcaggcagattacctgaggtcgggagttcgagaccagcctggccaacatggtgaaaccacgtctctactaaaaatacaaaagttagccgggtgtggtggtgcatgactgtaatcccagctactcaggaggctgaggcaggagaatcacttgaacctgggaggcagagattgcagtgagctgagatggtgtcactgcactccagcctgggtgacacagcaagactccatctcaaaaaaaaaaaaaaaaaaaaaaaaagaatggctccagattaggtgatctacaagggtgctacccgaagtatctgcagactggggctgcatggtaagtacagcatacacaacacaagcccagaaatttctactttttcagggatgacaacctgacatccctgctccatccgagcttgtgctgaacacaccatcttgctgaaaacggtttagacgagcctagtattatctagccgacaggattagtcacgtgcagcacaacctgtatacagggctgatccagcacagactagaaacattaaatgcttggtctgtttccaggaagttttgagaggcgctgctcagcaagacccttcccctagcgaaggatcgtgaaaacaggacctcccaccatcaacagatgccaatcaaacgttactcattccaggccgggtgcagtggctcacaactgtaatcccagcactttgggaggccgaggcaggtggatcacctgaggtcgcgagtttgagatcagcctggctaacatcgtgaaaccacgtttctattaaaactacaaaacaattagcagggcgtggtggcgcgtgcctgtaatcccaaatcctcgggaggctgaggcacgaaaatcacttgaacccaggaggtggaggctgcagtgagctgagatcacgccactgcacgcctgggcaacagagtgagactctgtctcaaaaaataaaaaaaggttactcattccaggcaacagcagtatacaggggatacagaaagaaacaaagaccggtggctctgccccaacaagcatatggggaggagaaatactaaacaaatattcacatgtgactgctctggtgggaaagtttgggtgtcctgggaatacacactgcagagacccaacatggcatgtgcatggggaagggtgggaggtaaaaaaaaagcctttccagccgggtgccgtcgctcaagtctgtaatcccagcactttgggaggccaaggagggcagatcacctgatgtcaggagttcgagaccagcctggccaacatggcgaaaccccatctctactaaaaatacaaaaattagctgggcatggtggtgggtgcctgtaatcccagctaatagggaagctgaggcaggagaattgcttgaacccaggaagcggagattgcagggagctgagatggtgccactgcactccagcctgggcaacagagagaggctccatctcaaaaaaaaaaacaacaaaaaaacaaaaaacaggctttctgaggaagtgccagagctccaagttctgacctcaaacatgggcagtttaacaaatgtgagctcaaatcctgcctctgtccttctgcacaggtgacctggtgacctgggaccatccctgcactatctatgtgcattccctcttgtgtcaataggggtgtcaggcagctaggaagaccttagcacactgcctggcacgcatgacgctctcaacaaatgcagccactatggtattacagttaagccaggcaaagaggatggagggcaaagagcagctcccacaggggaagcagcaggtgcagcacctgggctggaaggagactggacacagcaaagcaggaagctcctgacagagcactggtgccctgcctggcatccctgtcactgatgctcctgccactttgtgccaaatctcccgcccactggagctctgattcggatctgtacagtgcaactctagggcctggtagtgccttccacgtgggggttaagtaacacatggctgctgagtcaatgtatgaatggatggatcaatggatagacggacagatggtctagtgattgagtgcacaaccgctagagtcagaaaaacccaggttctaatcctgattctcattgattccctatgtggccacaaaaaagttgagccacatctctgaccctcagtttcctgatctgtaaaatgggaaagtgaccattatcttttaagaatggagggagaatgcaacactaacaggaagcacctaactgggtcagcacccaagggcaggcccccaaaaaggggagctgctggagtgtcttcaaaatctcagctcggccaggcgtggtagctcatgcctgtgatcccagcactttgggaggctgaggtgggaggatcgtttgagaccaagagttggacaccagcctggttaacacagcgagatacctatctctacaaaaaacatttagaaaattagccaggcgtggtagtaagtgcctgtagtcccagctacttgggagcctgaggcaagaggatctcttgaacccaggagctcaaggctgcagtgagctatgactgtgccgctgcactccagcctgggcaacagagcaagaccctgtctctaaaagaagaaaacctctgttcctcagggttcccccatccttgggcagtgctccatcatggcatccaccgccttgactgtgacgccgcctcctcaaatggccttcccttccacaccccagcaggagggcaaccccatcaccatcctgtgactccctgcctctgtcacctaacgtcacctctgtcactatctattccctgcttagaaaccatgtgtcccaccccatggtaagttccactctatctgtcttacccctgctgtaccccagcacctagcacagtagccagcatgcgttaggtactcaaatatctggtgaatgaaagaattaatgaatggatacaatagtcatgtacagatccccttaagactccaaatagttacacaatcaaattcagcaggaagtgtaaattctggggcctccagggcccaggcagatgatagacatatgaaggggttagggctgggatgaggcagagtctacaggccccacctcctcagagtccttctcaactacactcaatagatgcaaacagctctcctgaatcttgagttgcagaatgttccaatttttcaagaaaaatcagacatcttaatttttatataaaatctcctgattaaaaatctaatgttggcatctaattttaaaagtggcaggtctgcagcactctgaaagcaacagctatgtgtgaggttgttcattcattcattcacaggcatcggaggacgggtacggcaagaacaaaggatgggacaagccaagctagggcctcttctctgaagtttacagtcatatgtgaggggcagacattagccagatgacagcaaacataacagaacattataacggtaggaagtgatgtgagtgctcacatcagggaggtctggtaggagaaagaaatagatgacagaggtaggcagaaaggctagcacattctcagtcatctcccactcacacacacgctcaattaaagagaaaacttgtggctcacgcctgtaatcccagctcttcgggaggccaaggcagggatcacttgaacccaggagttcgagaccggcctgggcaacgtggagaaaccccatctctacaaaaaatacaaaatttagcctggcatggtggcacacacctgtaatcccagctactaagggggctgaggtggaaggatcactttagctcaggaggtcgagtctgcagtgagccatgatcgcaccactgcactccaacctggacaacagagcaagaccttgtgtcaaaaaaaaaaaaaaaaaaaaaagagaaagaaagaaaacgaaggtagggcttggcgaaacagaactgtcctctgaagtggaccatgcaattccaggatccaattagaccttacctgtgctgggctccctggactcctccccaaagccctgcgtgtccttctttttcctacaaagaggagcagacagtgtccactttcaatgggacatagagtcctcagccccctgacccccagctcagaaggccacaaacactaagtttcagccctggccctgccgcaaacttgctgtgtgacctctgacgttcaatacccttctctgggcccccactgcccggacaatcacagccaggtcagcagccaccgaccgtttacaaagtggcccgacagtgcgggtgcagggcggaaggtccgcggtggggctatttcttgggggatggggcttaagctctccaggaaggtgaacagagggacaaccaaggaacggagagtatgggtttaaggtctctcggggggtggggggcgaggaagataaaccaggctggaggcgtgcccagagggcggatagggcggggcctgcggcttgggggcggggcctgagaagtgcgccgagatcacgcttatgagggcggggctacgggttccccggatggagccgcagtccggccgcgacctactcacagcttaaagttcagcaccgccccggcattcatcagcaacgtcctgcagagggagaattacagttactaggggcgcccccgcgtcctgcctggctctctcttcccagcctctggtccccctaattacccgaacagcaggatgtctccgatcatcgttacggccgaagcgtccgtcagaaccggaagcggaagccccagggagggaggggagaggagcacaagccgaccaatcctaaagcaacagtggcgagggctgggccaatcgaaggtcaaggctgggagggtcccgccctctgcaggccagacccccttaggggagcgcgagcgccccacctcgctggggaggccccgagagccagaatgggaggagcggggtctcctgggggcgggattgggtcacgcgttcgaagcgtgccgcgcatgcgtgaggtctcgatgccgtagggttagctgggcagcaattcctactcactttctggggtcccaaattgggcttctggacaaaaggaatcctttgactcctgagctgcacagggtgcggggtcctgacgcagtggggtccctagaaacgggtgccccaaccaactgggctctaaaatgagatcctcctgggccccatggggaacgggggttcccactgagctgccccccacaagacgtcctgatttgcagagccccaccggagacggggttcctgatcgaacggaccctatggggcagaaaagtcttgacggggctccacagaggaccgaggtcctaacctatctccacggggaacaggggttctgattcatggggtcccaccatggcgtaggggtcctcactgggctccaccgaagatcggggtcctaattgagcccacggggacaaagtcctggccgatccggccccctgggaacgggcgtcccgcgtgggtgggctccgtgagggacgggcccccagaacaggcagctccccagcctccctcgccttgcacgggtgccccgcaccccgcctcgctgggcggaacggggtagcgatggcaggagggtcaacgcctgggacgcccgaccgtccagctgcgtccgtggtgctgggcgtccccaccacctgtcccggggtgggccgtcgcccctcctctcccgcgggggccgggcctggggtggcgcctggcgggcgggggcgggcccagctgcgggggcgcagtcgccgggccgcgggcggcgggacggacgaggccggggccccgggtggcacccggcaggcgggcaggcgggcgccatggagctgctctcggcgctgagcctgggcgaactggcgctcagcttctcgcgggtgccgctcttccccgtcttcgacctcagttacttcatcgtctccatcctctacctcaagtatgagccaggtgagccggggcggggggctggaggggaccggcagcgggtggcgcgggccggggcagctcgggggtcgcagagaggggaagcccgtgcgtggtggagggagcgagggacaggttcaaggattgcatcgtgggagtaggcaggcgctagaatcgtggggttctctcacgccggggtgagcccgggggagaagcccccaggacgatgaagctgggggaggggaaggagaggcgtgcgcgggtttagaggagggggaacaggtgcttggggtcggggctcctggttgggtcagagctgcaggaacttgggcaaggggcgccggctgtggcgagggtgcaggtgggggtcggtgcatctgttctggccgcgcgcaggtgtgacctccctccttgaccttggcacgcggattgagagcgccagcggagtgtctataagggccactgcgctgggggctgcggtcaggttcagcgaaagtgacaccggttctcctccccactgcaactgcccagcaccctccactcccctcccttcccccacggtgctgaatctccgagcccccacgggaattcttccagccctggctccagatcctttccacttacggagcagaaccggccccaaggctgggtgacttggggtcagtgtcctccatctcagctccagactccacgctggggaggtcacaggagggtacagcctgcttcttaatttttaaaatgaggatgaatggcttccttagaacgtgttctatttttataaaaggttcaccgtgaacaaatgtttaaatgtttcttgttcaccgttattctagaacaccagcaacttactagataatagattttaggcttagaaaaataaaggaaccccaaacttcataagcctttctcccacttagatgtaaattaccactatagctcagaaaggaaatagctttattctcagaggataaaaataagcgcccctgtttactaaaaactcaaactgaaaagggcaaaggaaaaaaagagaattactgtcaacatactggtggccagccacctttcttgatgtctcttctattcatttacggctatatagttataaacgtaaatgcacgcttttttttttttttttttttttgcggttttttttttagatggagtttcgctctgtcgcccaggctggagtgcagtggcgtgatctcggctcactgcaacctccaccttccaggttcaagcgattctcctgcctcagccttctgagtagctgggactacaggcacccgccactacacttggctaatttttgtatttttagtagagacaagccttcaccatgttggccaggatagtctcgatctcctgaccttgtgatccacccacctaggcctcccaaagtgctgggattacagacgtgagccactgcacccagccaatgcacgctcttatgctaacaggattacactctatttgctaggaatttttattctatttttgcctatccacatgccagagcctattttcttaaaagctatcctggagaacattactttgcaaaacaaaataggcttttgtgttgtcctagcatgaacatggggctatctttcctttctggggaagaattcttggtggttcaggccagttccttgggcagttgcagaaccttagaaaatctgaaactggctgggcacagtggctcacgcctgtaatcccagcactttgggaggccaagacgggcagatcgcctgaggtcaggagttcgagaccagcctggccaacatggagaaaccccgtctctactgaaaataaaaaaattagccaggcatggtggcacatgcttgtaatcctagctgcttgggaggctgaggcaggagaatcacttgaacctgggaggcggaggttgcagtgagccgagatcacgccattgcactccagcctgggcgacagagcaagactctgtctcgaaaaaaaaaaaaatctgaaactgaggagggttggagccctgtgggaatgtaggacacaaatgtcttgagaaaagaggtctccaagctgcctgggaacttgcaggaaggttcaagatatttctgcagaagtcctagaataagccatccaggctctaagtgccagagcctgaaggttcctgaaggctgagaagtggttccaaaccctggctattcatgaattcatgagacgctcctgggagctttttttcttttcttttttttttttgaaacggagtctcgctctgtcgcccaggctggagtgcggtggcgccgcctctgctcactgcaagctccgcctcctgggttcacaccattctcctgcctcagcctcccaagtagctgggactacaggcgcccaccaccatgcccggctaattttttttttttttgtatttttagtagagacagggtttcaccgtattagccaggatggtctcgatttcctgaccttgtgatccgcctgcctcggcctcccaaagtgctgggattacaggtgtgagccactgcgcccggcctcctaggagcttttaaaccccctatctccaccccccaccaattgaatcagaatattaatctcccctccctcagtgactgatgtctgttatcagggctgaggatactccacccagttcaacctcctcctttcataactggggaaacaggaaatagtggctaagctatcttaaatacacaatgagcctgtggtcccatggctggtcagttgcagcctcgggactcagcccaggtctgcttgactctaagaatcagtacaattgatgtgagattggtttccttagaaaagaaaggtgttggaggccagatgtgatggcttatgcctgtaatcccagcactttgggaggcgaggcgggtggatcacttgagcccaggactttgaaaccagcctgggcaacatgacaaaaccccgtctccactacaaatgcaaaaaaatagccaggtgtggtggcgcacgcctgtaatcccaggtacttgggaggctgagacatgagaatagcttgaatccaggagacggaggttgcagtgagccgaaatctcgctgctgcactccagcctgggtgacagagcctggctgagactctgtcttggaaaaaagaaagaaagaaaagaaaagtgaggtgtcggattgaactgttagtcccagtttggtgtgcgtgctgggtatctgtaaattttcttctcagaatttgtgtgctggaccagctacagaatttgccaggccgatacaaagtatcagtgtggggccttttgttcagaaattaagaatttcatagccaggcatggtggtgtgtgtctgtggtcccagctacttgggaagctgaggctggaggatcacttgagcccaggagttggagctcaactgcgcctggctgggtcaggctttcttgagaatcctgagaatggatgaagctcagagtgtggtcctcaacagagcagcatcaatgttgcctgggagctgcagcgagctatgatcaccccaccgccctccagcctgggcaacagagcaagaccgtgtctcctaaaaaaataataataataataaaaaaagaatgtcagcataggtcagataatctcagcatttggggaggtcaaggttggaagattgcttgaggccaggagttcatggccagcctgggcaacattgtgaaaccccttctctataaaaaatacaaaaatggctaggcgcggtgtctcatgcctgtaatccgagcactttgggaggctgaggtgggcagatcacctgaggtcgggagttcaagaccagcctgacctacatggagaaaccctgtctctactaaaaatacaaaattagccggacgtggtggcacatgcctgtaatcccagctactagggaggctgaggcaggagaatcgcttgaacctgggaggcagaggttgcggtgagccaagattgtgccattccactccagcctgggcaacaagaatgaaactccgtctcaataaacaaataaataaaaattaaaaaatgcaaaatacaaaaatattagccaggtgtggtggcatgtgcctgtagtcctagctactagggaagctgaggtcggaggattacctgaaccctgcaaggtggaggctgcagtgagccatgatcgtgccactgcactccagcctgggcaacagagtgagaccctgtctcaaaaaaaaaagaaaaaagaaactaaacgtctctgaatcatgggagtcagttctaccactagcactgagtaaacaccacaatggttatttcaccaccatgagcttcagtttatttgtctgtgaaatgggatcattggtaagagaaccccagactccctttcctagcgattgtaaagatctattgagaattttgtcagggataaggtctaaggcatttgtgaggggtggtgatgtttatttggaagtctagggaggaatatattacttgggatactggcattttctgggtcaggcttgcttacttttctgtttcttttcttttccttttttttttttttgagatgcagtcttgttttgctgcccaggctggagtgcagtggcacgatctcagctcactgcaaccttcacctcccagattcaagtgattctcctgccttagcctcctaagtacctgggattacaagcatccaccaccacacccagctaatttttttgttttgttttgtttttggagacggagtcttgccgtgtctctaggctggagtgcagtggctcgatcccggctcactgcaacctccacctgccgggttcaagcgattctcctgcctcagcctcccgagaagctgggattacagacacgcgccaccatgcccagctaatttttgtatttttagtagaaacggggtttcaccacgttggccaggatggtttcaatctcttgacctcgtgatccgcccaccttggcctcccaaagtgctgggattacagacatcagccattgcgcctggcccattttttttgtatttttagtagagatgagttttcaccatgttggtcagggtggtctcaaattcctgaactcaagtaatccacccgcctcagcctcccaaagtgctgaaattacaggtgtgagccactgctcttggccaatttaactttaaaaaaatttttttttttcgagacagggtcttgctctgtctcccaggctggagtgcagtagtacagtcatagctcactgtggcctccaactcctgggctcaagcaatcctcccacctcagcttcccatgagcaactgtgcctggctgggtgaggctttcttgagaatcctgagaaagaatgaagctcagagtgtggtcctcaactgagcagtgtcaatgtcacctggaagctgattagaaatgcagagcccctgcggtggctcatgcctatagtcccagcactttgggaagccaaggtggctggatcacaaagtcaggagtttgagatcagccaggccaacatggtgaaaccccgtctctactaaaaatacaaaaactagccaggcatggtggcgggctcctgtaatcccagctacttgggtggctgaggaaggagaatcgcttgaaaccagaagatggaggttgcagtgagctgagatcgcaccactgcactccagcctgggcaaaagagcgaaactccatctcaaaaaaaaaaaaaagaaaagaaatgcagagttctggccaagctcagtggctcacacttgtaatcctaacactttgggaggccgaggcgggcggatcacccgaggtcagaagttcgagaccagcctggccaacatggcgaaaccctgtctcttctaaaaatacaaaaattagccagtcatggtggcacacgcctgtaatcccagctgctcaggaggctgaggcaggagaatcacttgaaccagggaggtggaggttgcagtgagccgagattgcgccattgcactccagcctgggcaacaagagccaagagtgaaactccatttcaggaaaaaaaaaaagagaaagaaatgcagaacccaggccccacccagctctgcccaatgagagtctgtatttgagcaaaatctgcgggtgatttggctcatttctggggcctccaagctccatgtgaggaaagagaaggaagcagttgagtgctggctgcaaaactgaagaaatgagtgaatcaatgacaatcctggttgccttgagccttgacccatccaaagaatctctcagaccagtacttctcaaactcacctacacaccagactcacctagggagattttaaaaatccttttgggccagacgtggtggctcatgcctgtaatcccagcactttgggaggccaaggcgggtggatcacttgaggtcaggatcgagaccagcccggccaacatggtgaaagcccgtctctactaagaaaaaatacaaaaattagccacgcatggtggtgtgcacctgtaatcccagctacttgggaggctgaggcacaagtattgcttgaacgcgggaggtggaggtttgcattgagccaagatcttgccactgcactccagtctgggtgacagagcaagactccgtctcagaaaaaaaaaaaaaaaaatccttttgtcctgattgtcacccctctttcatttaaatcagaattgtgggtcaggcatggtggctcacgcctgtaatcccagcactttgggaggctgaggctggtggatcacctgaagtcagaagtttgagaccagcctgaccaacatggtgaaaccctgtctctactaaaaatacaaaaattagccaggcgtgatggcgggcgcctgtagtcctggctacttggtaggtcgaggtgggagaatcacttaaacctgcgaggcggaggttgcagtgagcagagatcatgccattgcactccaacctgggcaacagagcaagactctgtctcagaaaaataaataataaataataaattaattaaataaataactcagaatcatggggctgaaggaggtggctcacatctgtaatcccagcaagttgggacaccaaggcaggcagatcacttgaagccaggcgttggagaccagcctggccaacacagtgaaaccctgtctctactaaaaatataaaaattagtcaggcatggtggcgcaagcctgtaatgccagctactccggaggctgaggcacgagaattgcttgaacctggggggaggcggaggttgcagtgactctgtctcaaaaaaaaaaaaaaaaaaaagagatgggggttctgttgtgttgcccagggtggtcttgaactcctgggctcaggagatccacctgccttggcttcccaaagtgttgggattacagacatgagccactgcacccggccaaccactgatctttctttctactacctccagagttttgccttttccagaatgtcctttagttggaatcatgcagtatgtacccctttcagactggcttctttcacttaggaatatgcatttaaggttcctccatgtcttttcatgtcttgatagctcactggataatatttctttcttttttctttttctttcttttttttttttttgaaatggactttgctcttgttacccaggctggagtgcaatggtttgatcttggctcactgcaacctctgcctcccaggttcaagtgattctcctgtgtcagcctcctaagcagctaggattacaagcatgtgccaccacgcctggctaattttttgtatttttagtagagatggggtttctccatgttggccaggctggtctcgaactcccgacctcaggtgatctgcccgccttggcctcccaaagtgttgggattacaggcgtgagccactgcacccggccaaatagtatttcatagtaaggatgtttcatggtttgtttatccactcactccctgcaggacatcttggttgcagttttaactttttttttttttttttgagacggagtcactctgttgccaggctggagtgcagtggtgtgatctcggctcactgcaacctccggctcactggttcaagcaattctcctgcctcagcctcctgagtagctaggattacaggtgcccgccaccatgcccagctaatttttgtgtttttagtagagacagggtttcaccatgttggccaggctagtcttgaactcctgacctcaagtgatccacccgcctcagcctcccaaagtgctgggattacaggtgtgagccaccacacccagacaagttttaacatttttcatatgctgttaggaccaaagaaaaccattctttgatccctgatttgagatctctggtttgaactacaagctttttgagggcaggaggctgttgactcctgctccaccttgtgagggagaggctgctatctccatttaacaggggaggaaactgaggcagaatgctgagctcaaaagctcaggaggagaagactggtcctagagtcactgagagactcggtcagtaccccatgcttcatacacctctgactgaatagcacagtgctagagtgccctggggacccttctagtaccacccagtcatctgcaaatgaggcattgacccctgaaaagggaaagtcacagagtccattgcagaccaggacttagggacccaaagctttttcctctcttctgaggcagagctgatttttttctgtttgtttatttatttatttatttttattttattattttatttttttgagacagagtttcgctattatcgcccaggttggagtgcagtggcgcgatctcagctcaccgcaacctccgcctcatgggttcaagcgattctcctgcctcagcctcccgagtagctgggactacaggtgcctgtcaccacgcccagctgatttttgtatttttaatagagatggggtttcattctattggccaggctgatctcgaattcctgaccttgtgatccacccgcctcggtctcccaaagtgctgggattacaggcatcagccactgcgcccggcctgttttttgtttttttttttttttgagacagagttttgctcctatttcccaggttggagtgcagtggcatgatctcgactcactgcaacctccgcctcccaggttcaagcgattctcctgcctcagctgccggagtagctgggattacaggcatgagctaccgtgcccagccgaggcagagctgatttttaaaaaatccatctactgaaatttccacccacaggtactttccatttccgcactgttccagaaatacctcttgcgtcgttgctaggcgctaagcaatctctttttcaccctcacaggcatctttggaaatgactgatatagatctggtgtggtcaccttgtccaggctttcccaagatgagcatcgaaagtcccatgtccagccgggtgcgggggctcatgcctgtaatcccagcactctgggaggccgaggaaggtggatcacctgaggtcaggagtttgagaccagcctggccaacatggagaaatcccatctctactaaaaatacaaaagttagccgggcctggtggcgggtgcctgtaatcccaggtactcgggaggctgaggcaggagaatcacttgaacccgggaggtggaggttgcatcaagccaagatcgcaccactacactccagcctgggcgacagagcaagaccccatctcaaaaaaagaataaaagaaagtcccatgtcccaggaaacccctgggacccaggcaaagggggatagttggtcaccctagaccgcctccccctcctacatatgggcaaactgaggcccagggaagggagggactagcctaagctcacccagtcagaggggaatgtgttcatggcatgcggcagttgaaaacctattggcttcatggggctgtcccaaacccatcaagagaaaccaaggagtatggaaaggggaaaggacctgggcttttttttttttttttttttttgaggcggagtctcactctgtcactcaggctggagtgcagtggcacgatcttggctcactgcaatttccgcctcctgggttcaagcaattctgcctcagcctcctgagtagctgggattatagccatccgccaccatacccagctaatttttgtatttttagtggagacggggtttcaccatgttggccaggctggtctcaaactcaaactcctgacctcaagtgatccacctgcctcggcctcccagaatgctgggattacaggtgtgagccactgcgcctggccgtcatcttggtcttttgacagtgaagcaaactaaggcttgggggggcaggcagtcacttgcccaaggccatgctagagtgagtagcagagccagaagctaggcatgtgatgaggttttgccatgttgcccaggctggtcttgaactcctgagctcaagtgatctgcctgccttggcctccgaaagtgctgggattacgggtgtgagccaccgcgcccagccggcatgtgacttttatagcagggcacacacatactgcaaacatgggcatctgcccgtcagagcgtaactcatgcaaacgctaggtccctacccccactccccaacctcggtccctgggatgatcccagagggcacaagaaagatcctggaaagaattcagtccctgggagttatttttagatgcagaggtatccatttctgcaaaacatgggtgcctcacccgacctggcctctgcacaggccaccagctgctctgagggattaactctcagccagttgtgttttaaatagaccctaggagaggagctgaagcattttacctcataccctaggaccttggtcaatggtaagacgtaggacaaccttgagagcagggagaagctgcattttgggctcataactccagggtgaggttagaggagggaaaagctcattccagtcctcatcaggagttagacaaagaagcaacgttctactttgttttttaaaaaaagagatgtggagagaaaaaagtggcttgttcaagatcacattgttagttggtggggatagcgaggagaggggcaagtgtattgattacttactctaaaacagggatgtccaatcttttggcttccctgggccatgtttgatgaagaattatcttgggcctcacataaaatacactcacactaacgatagctgatgagcttaaaaaaaaatcacaaaaaaacctcattttttttttttttttttttgaggcagagtcttgctctgtggcccaggctggagtgcagtggtgtgaccttggctcactgcaacctccacctcctgaattcaagtgattctcatgtctcagcttcccaagtagctgagattacaggcgcatgccaccacgcccggctactttttgtatttttagtagagatgggggtttcaccatgttggctaggctggtctcgaactcctgacctcaagtgatccacctgccttggcctcccaaagtgttgagattacaggtgtgagccactgagcccggccataagtgtatcattttgcagcccaaccttttcactcagcagtaagcttatgggacttgtctttgttgatacatctaaaacagagattctcaaccagaagggattctgttcccaaaggataaatttggcaatatctggagacattcttggttgtcacagctgtgtggtgccactgtcatctagtgggtggaagccagggatgctgcttaacatgctataatgcacagaatgcccccatagcaaaaaatgatctgatcccaaatgtcaacagagctgaggttgaaaaaccctgatcaaggtctagttcacttttctttttctttttgtttgtttgtttgtttgtttgtttctgagatggagcctccctctgtcgcccaggctggagtgcagtggcgcaatcttggctcactgcaacctccacctcccgggttcaagcgattctcctacctcagccccctgagtagctgggattacaggcacctgccaccatgcctggctaatttttgtatttttagtaaagacagcgtttcaccatgtcggccaggctggtctcaaactcctgacctcaagtgatccgcctgccttggcctcccaaagtgctgggtgagccactgcacccagcctggttcacttttaaatagctactctatggcactccacattttgtggcttcccacagctttactaagagactgttgatttcacttttctcctgttgcaacattgtatcagtgaaacatcttccttctctaagtctttgtttatggtgcttgtttctttggggttaatagcaaggagtggaattgctggggtccaggggatgcacagcttcatatttccctggtattgccaagttgcctctaacatggtaatgcccactgatgcgctcacctggatttgtaggagaaactctggcattgatgattatttccccctgtgaggttgaccaagctaagaagaacgtaattccttttacagagtagagtgcactacacctttctcaattaataaatggaacagagaaggtcattgttgttacaatgtcaccagaaatgcgcaggcctgctggtggctcacacctgaaatcccagcactttgggaggccaaggcaggaggatcatttgaagccaggagttcaagagcagcctgggccacacagtgagatcctatctttacaaaaaaagaaaaaaaaaaaagtataaaaattggccaggcatggtggcacacgtctgtactcctagctacttggaaggctcaagcccaggagtttgaggctgcagtgagctatgattgcatcactgcactccagcctgggtgacagagcgagatgctgtctcttaaaaaaagtgtccagggccaggcgctgtggttcatgcctgtaatcccagcactttgggaggccaaggtgggtggatcacctgaggtcaggagttcgagaccagtttggccaacttggagaaaccccctgtctactaaaactacaaaacttagctaggcgtggtggcaggtgcctgtaatcccagctacttgggaggctgaggcaggagaatcacttgaacctaggaggaggcggagattgcagtgagccgagatcacaccactgcactccagcctgggcgacagagcaaaactcttgtctccaaaaaaaaaaaaaaaaaaagttggggggatccaacacaaccatgatgactttatgtttgctagaatgtaaattccatgagggcagggacctcacctgtcttgttcattattgtaataccaggacccaaggccgggcgccgtggctcacacctataatcccagcactttgggaggctgaggtgggcagatcacctgaggtcgggagtttgagaccagcctgaccaacatggagaaaacttgtctctactaaaaatacaaaattagccgggcgtggtggtccatgcctgtaatcctagctagtcgggaggctgaggcaggaggattgcttaaacccaggaggcagaggttgcagtgagccaagatcgcgccattgaactccagcctgcgcaacaagagcgaaacaccgtctcaaacaaacaacaacaacaaaaaaaaaccaggacccagagggatgcacatttcccataaattcattcacagttatttcttgaacccatacaatgtgtccaacacagcccccattcagtggcagagaaggcctccgtggttgctgaactcacggagggatgaagatcaaatccacccgttgaatgtatcattagtatatacagatttcttaatctgttgcagatgctataatctgttgcagtggcaataaaccagtagaccaggtggctgataaacaacaaatttatttctcagagttctggaggctggaagtctgagatcagggcactaacatggtcaagttctaatgagggccctcttctggcttgcagatgatcaacctctccttgtgtcctcatatggtagacagcagagagcagcaggctttctcatgactcttatttgtttatttattgagatagagtcttgctctgtcacccaggctggagtgcagtgccttgatcacggctcactgcagcctcaaccttccaggctcaagtggtcctcccacctcagaagtagctgggaatacagacacctgccatcacgcccagctaatttttattgttgttgttgttttagagatgagatttcactatgttcccagggctggtctggaactcctaggctcaagagatcctctggcctcagcctcccaaagtgctgggattacaggtgtgagtcaccacgcctggcctctcttgactatttttttttttttttttttttagagacagagtctcactctgtcgcccaggctggagtgcaatggtgcaatctcagctcactgcaacctctgcctcccgggttgaagcgattctcctacctctgcctccctagtagctgggactacaggcgcctcccgcaacgcccagctaatttttgtatttctagtagagacagggtttcaccatattggccaggctggtctcgaactcctgaccttgtcatctgcccgcctcagcctcccaaagtgctgggatgacaggcgtgagccaccatttataaaggctctaaccccgttcgtgaggggtctaccctggtgacataatcacctcccaaaggcccgacctcctaatgctatcacaagcggggaggggtaggatttcaacatacgaattttggagagacagaaacattctgtccacaacagacactctttctcttccctgctaaaaatagacaaaactgattatttcttttgcttagtcttttgatttgactaataagagatcacattttggccgggcgcggtggctcacacctgtaatcccagcactttgtgaggccgaggcaggcggatcacgaggtcaggagattgagaccatcttggctaacacagtgaaaccccgtctctactaaaattacaaaaaattgggcgtgctggcgggtgcctgtagtcccagctactagggaggctgaggcaggagaatggcatgaacctgtgaggcggagcttgcagtgatctgagattgcgccactgcactccagcctgcgggacagagcgagactccatctcaaacaaaaaaagagagagattacattttgtgaccttgttatctcatgtcaatactgactgtagttttcatttcattagaataagttgtattaggggaatcgttggttttggctctggtcatgtaatgtacagagtagctgtaccttacaacttgatcataaagttgttctctgcaaaacgaaactagttgggaaagacagaatcaatatgatgaaagaagtggtcataccaggagacacaagttctaactccaaggtgtggccttagaagattacgaagatacaacataaggatagaactatttataaagattataaaggctttacatgagtaatacaagatgcaaggatttagtgaatagacattaatactgtaccccgagtgttgcattttcatgacctttttttttttttttttttttgagaggtagtctcgctgttgttggcctgggctggagggcaatggcacgatctcagctcactgcaacctctgcctcctaggttccagcaattctcttgactcagcctcccgagtagctgagattaaaggcgcccaccaccacgcctggctaatttttgtatttttagtagagatgaggtttcaccatgttggccaggctggtcttgaactcctgacctcaggtgatccacccacctcgccctcccaaagtgctgggattacaggcatgagccaccgtgcccagccctttttttaaaaagaaaaaaaaaaaaaaagcccagctataggacctaaggactcagcaatggggttttcaagcccccttctttttaatatggaattttaaaatacttcttatcttggaagagtttatgactcacaagaagttgcaaaaatggtacagagaatttgcaaataccctttacccagcttcctccaatgacatcttatgtaatgatagtgcattattaaaaccaggaaattggcatgggtacactatcattaactcaactacagactttatatatttattatttttgagacagagtctcattctgtcacccaggctggagtgcagtggtgcactcatggcttactgcagcctcaaactcttgggttcaagtgatcctcccaactcaacctcttgagtagctgggactacaggtgcatgccaccatgcccagctaattagaaaaaattttttgtagagatggggtctcactgtgttgcccaggctggcctcccctccccttccctcccttcccctcccctctcaacagggtcttgctctggagtgcagtggcatgctcatgactcactgcagcctccacctcaccagctcaagtgatcttcctacctcagcttcccgagtagctgggactacagaagcatgccaccacgcccagctaatttttaaaattttttgcagaggtggggtctcactatgttgcccatgttggtctcgaacacccaggctcaagtgatctacgtggctcagcctcccagagtgttgggattacaagtgtgagccaccgtgcccagcccggaaataaaagcttaatacatgctacaatggggatgaagcttgaggacattatgctcaataagccacacaaaacaacaaagtttgtatggtttcgcttacatgagattcctaaagtcatcaatttcatagagacagaaagtagaatggtgccaggggctaggcgatgggggatgaggagtgagtgtttaataggtttcagtttgggaagatgaaagagttttggagatggttggtggtgattatggcaaaacaatgtgaatataatgccatagaaccacacacttggccagccacttggcagtggctcatgcctgtaatcccagcactttgggaggccaaggtgggcagatcacaaggtcaagagattgagactatcctggccaacatggtgaacccccatctccactaaaaatacaaaaattagttgggcgtggtggcgcatgcctgtaatcccagctactcgggtggctgaggcaggagaatcacttgaacccgggaggaggaggttgcagtgagccgagatcgcgccaccgcgctccagcctggtgacagagtgagactctgtctcaaaaaaaaaaaaaaaaaaaaagagctatacacttaaaaatgtttaaaatgggctgggcatggtgtctcacgtctataatcccaactctttgggaagctgagccaggtggatggcttgagcccaggagtttgagaccagcctgggcaacatggcgaaaccccgtgcctactttaaatatacaaaaaattagcctggcatggtggcgcgcgtgcctgtagtcccaaatactttcgaggctgaggtgggaggagtgtttgagcccaggaagtcaaggctgcagtgagtcgtgattgcaccactgcgctccaggctgggtgatgggagtgaaaccctgtgtccaaaaaaaaaaaaaaaaaaaaaaagtaaagtgataaatttaatgtatattttacaaaaaaaaattctttttaagacagcaggtgtaagaataccagcataaggctgggcacggtgactcatgcctgtaatcccagcactttgggaggctgaggtgggaggttcacttgagtccaagagttggagaccagcttggccaacatggtgaaaccccttctctactgaaaatacaaaaattagccaggcatggtggtggctgcctgtgatcccagctactcgggagtctgaggcaggaggatcgcttgaacctgggaggcagaatttgcaatgagctgagattgcaccattgcactccagcctgggtgacagagtgacactctgtttgaaacaaacaaaaaaagttaaaaaaaaaaaaaaaaaagaataccagcataagctcatagggatcttgggatcagctgaggtcagaatagcaatttcttttgtttcgtgtgtgtgtgtgtgtgtgtgtgtgtgtgtgtgtgtgtgtgtgtgtatgtgtgtgttttagatggagtcttgctctgttgcccaggctggagtgcagtgcagtggtgcaatctcagctcactgcagcctccacctcctgagttcaagtgattctcctgtcagcctcctgagtagctgggattacaggcatgcactaccgttcccggctaatttttgtatttttagggacggggtttcaccatgttagccaggctggtcttgaactcctgacctcaagtgatttgtccaccttggactcccaaagtgctgggattacaggtgtgagccaccatgcccggcccagagtagcaatttcaaagtactcccaggtacaagctggcccgtctcaccaagcctcagtctcctcttgacaatgagactcctgataataaaagccatcacttggctgggacactgatgaggatttattaagtcctaaatgtgaactagtgtcatcatcattgccacctctctgggcatgaaggaaaggactcccactcggctctctattttctctgtgcaacctcaggcatgcgtacagcctctctgaaccttggttcctcctctgaaacttacaaactgcacagtgttgggtgggcgctctggattaggataggctgaccagagcatatgggagtgaagcctgcccttggcatgctggtgatgatgggggacactcctgtgcctcccaggagcagtcgaactgtcccggcgccaccccatcgcgtcctggctgtgcgccatgctgcattgcttcgggagctacatcctggctgatctgctccttggggagccactgatcgattacttcagcaacaactccagcatcctgctggcctcagctgtctggtaagccatgctgggcatgggagagcagagccgggtgggggaaacaacaacctgggcaccagggaggagagaggttggaggaattagaatgcaccagcaacagccctcatgatggccctgaatatgctgccctccatgcccatctctggtctaggcacagcacgttggggagggtggtctgatataaccacagctccctacccccatccttcacagtctgcccatcccctggcactcactgttctctccccaaaaggtacttgattttcttctgccccctggacctcttctacaagtgtgtctgcttcctgcctgtgaaactcatcttcgtggccatgaaggaggtggtgcgagtccgcaagatcgcggtgggcatccatcacgcccatcaccactaccaccacgggtggttcgtcatgattgcaactgggtgggtcaaaggtaaataggatgatgacaatgaaaaatcatcccagtggagaacttttggttcagtggtactaccaggcaccccagctaggaaagccattgctccaggcacaggggcataaagactgcagtaggtgttcaaacctccctacaggtatcagccgatacctttagggtaaatgggaagattcttctagaaatgttactgtcaggggtacctaagacagtgatgatgatgacaaaagccagcattgccagagcaggttttctcacttgcagcactactgacatgtggggctggatcattctttgtggtgggggctgccttgtgcactataggatgttgaacagcacccctggcctccacccacgagatgccagtagcacacttgtccccagctgtgacaaagaaattgtctccagacattgctaaacgcctcctagagggcaaaatggctgcaggtgagaaccccttcttctctagagctctagctataggagttcttaacttttgtggaccatggcccttttgccagtgaagcctacagaccctttcgtgtgcagaaaatagagctagacatggtggctcatgcctgtagttctagctactcaggaggctgaggtgggaggatcacttcagcctaggagttcaacattacagtgagctatgattgtgccactgcactccagctgggcaacagagcaagagtctgtctctaaaaaattaaaattaaaaaataaagtaataatgaaaatgttattagaaataaagaacgttttataatgataaaagggtcaatccaccaggaagatataacaactataaacatatatgcacctagaaacagagcaccaaaatacataaagcaaaaatggacagaagttaggggagaaagagataattcaacattaaaagttggagaagtgggccaaggagtaacaggaaagcagggaaagaaggcctgagcaagtgccaaaaaccattgggcactttatcctcgcttcctgcccaccagatatgggtacccacaaagtgccaagacctagaatcaccctccattgagccatggtgtcctcagttattccttgctatggggagccaacctgtgcattatacaatggtgagccacctccctggcctcgactcactaaataccagtagcgctccctccccagctgtgacaactcaaagtgtttctcaacattgccagatgcttccttgggggcaaaatggccccagatgcgattccctggtccagtagtacatctcaggcacccagttggtgcagcagttcctggagtggatgtccaagtctatttaaccagtacatttagggtaaatgggaagattcttccagaaatttaatcattctatctccatttgagtcttcttattgtctctccaggaagcttttagtactgagcagattccccaggggtatagcatctcctccagaggatgggtggcttgagaaagattaagaacttggagccttgaggaggagagagactgcgggtgggggctgccttggaagcctcatacacagcttggggtcctggattaggggcatcaggacagacaaccccaggttgaagacctgccttgcaggtggggacatgactgattcctttaggtggcttttgctctgaatttgccatatgatcctcagcaaggctctgtcctctctgagcctcagtttccccacctgcagctgatgatcatacacccccaggctcagtgtccttctagagaagattctgggagtggagagactgcttccttgggaattcaaacaagaggaaaggagacctgggggtggtgggcttgttcagaagcaccctgtcctgtaggttctggtgtcgccctcatgtccaactttgagcagctgctccgaggggtctggaagccagagaccaacgagatcctgcacatgtctttgtgagtatcccactccacctctccctccatgcctcctgtatgtccgggtgcctgaccctgagttggatgctgctgataacttagagaggcctcaacccttgactctgcctttcaggagctttcagaggctatgactggggaagctcaaagcagagccatagctctgctcagtgtggaggttggggagggcagagctgcaggaaggaggcaatacctgattggggttttgaagggtgagcaggagttcactggccaagaaggagcctcccaacagaggccagcatctctgccaactgtgaaatcacagaagagcagcagtgctgctgggtgtgcggggtcagggtacagggtatgcatgggatatggagtgtgcattgggagcatatctggagctaagtggacaaggccaggtgacagcatccaagacccaatgcaggatcccacactgcatttagcttaatgttttttatttttttattttttgagacagagtcttgctctgtcgcccaggcttgagtatgctggcatgatctcggctcactgcaacctccacctcccaggttcaagagattctcgtgcctcagcctcctgagtacctgggattacaggcatgtgccaccatgcccggctaatttttgtattttgagtagagatggggtttcaccatgttggtcaggctggtctggaactcctgacctcaagtgatctgccgacctcagcctcccaaaataccgggattacaggcatgagccaccctgccctggacagtttagtgcatttttaaaagaccttgttgggggctgggtgtggtggctcacacctgtaatctctgcactttgggaggccaagcctggaggtttgcttgagtccaggagttcaagacaagactgggcaacatagtgagacctattctatattaaaaaaaaaaagttaaattagctaggcatggtgggatgcacttgtggtcccagctactcaggaggctgaggcaagaggattacttgagcccaggaattcgaggcttcagtaagctaggatcatgccactgtactccagcttgggtggcagagcaagaccttgtctcaaaaaaaaaaaaaaaaaaagggatcatgcatttaaatcacctggccctggaacctggtgagtgctttggaaatattagagagaattatcatcattaggctgggcacggtggctcacgcctgtaatcccagcactttgggaggctgaggtgggcagatcacctgaggtcggcagtttgagaccagcctgaccaacatagagaaaccccatttctgctaaaaatacaaaattagctgggtgtggtggtgcatgcctgtaatcccagctacttgggaggctgaggcaggagaaccacttgaatctgggaggcggaggttgcagtgagccgagatcacgctattgcactccagcctgggcagcaagagcgaaattccatctcaaaaaaaaaaaattaactaggggtggtggcatgcctgtagtcccagctacatgggaggctgaggcaggagaaccggttgaacccgggaggcagaggttgctgtgatccgagatcctgccactgcacttcagcctgggcaatagagcaagactctgtctcaaagaaagaaacagagagagagagagagagaggaaggaaggattattaaatacatgcagtgaagctgggcatggtggcccacccctgtaatcccagctattcaggaagctgaggtagggggattgcttgaaaccaggaattcaagaccagcctgggcaacattacaacatcccatctctaaaaaaaaaaagaaaaaaaaaattagccaggtgtggtggtgtgtgcctgtagtcccagctactcaggacgctgaggcaggaagatcgcttggtctcagaaggttgaagctggagtgagctgtgatcacacaagtgtactccagcctgggcaacagagcgagaccttgtctcaaaaaaaaaaaagcaatgagagacagacatcaggaatagaagtcacaggtctgtcttttgcaacaaataaaaatatcttaaacctattttgcaaggaaaaaaataaaagttaaggaaaactctgcatgttgtaatcacattttctgggggaaataagctgatgggggatccccaagatcatcctgatgttccatgatttgctagaaggactcagagaacttagcaaagccattatattcagggttatgatttattacagtgacaagatatagaataaaatcagcagaggcagctcacacctgtaatcccagcactgtgggaggccgagataggaggattgctcaaggccaggagttcaagaccagcctatgcaatagaacaagactccatctctacaaaaaaaaaaaaaaaacttaaaaattaagcaggcacagtggcacataactctagccctagctacttggggggctgaggtgggagaatcacttgagcctcagagtttgaagttacagtgagccatgatcagaccactgcactccagcctgggtgatagagagagaccctgtctctgtaaataaataaataaataaataaataaataaataaaacgaaatcagcaggggttggctgggcgtggtagctcatgcctgtaatcccagcactttgggaggctgaggcgggtggattatttgaggtcaggagttcaaaaccagcccggccgacatggcgaaaccccatctctagtaaaaatacaaaaatcagctggcgtggtggcgggcatctgtaatcccagctactcgggaggctgaggcaggaaaatcacttgaacccaggaggtggaggttgcagggagctgagatcatgccactgcattccagcctgggtgacagaatgagactctgactcatacacaaacaagaaatcagcaggggcaaaatgtgcatgaggcagagtacaggaaagaaaaggtgaaaatatccagttttcctctcccagtggaatcatgtggacagggcttcattctcccagcagcaatgtgtgacaacatgcatggtgtactgccaaccagggaagctcttctgagcctgggtatccaggatttttattgtggctcagaactagctaaccacctgtgtggctgacctcagtcttcagcccctctagaggtccacctgatgctgcatggcccaagacccccaccataaattacgttgttactacctggtgtggcccaaggccgtcctcaggcaaacaaagacagtcttatcaaggcaggacactccaagggcttagagggcatattccaggagctggacaaaggccagatctttccttggaccaggttaacccatcatgcataggatgacaccatctcaacctgccaccttacaatcaggagaagctgtggctgggcgcagtggctcatgcctataatcccagcactttgggaggccgagcagatcacttgaggccaggagttcgagaccaacctggccaacatggtgaaacactgtctctcctaaaaatacaaaaattagccaggcatggtggcatatgcctgtaatcccagctacttgggaggctgaggtgggagaaacacttgaaacaaggaggtggaggttgcagtgagccgaggttgtgccactgcactccagcctgggcaacagagtgagattccatctcaaaaggaaaagaaaagagagaagctgggatgggagctggtgccagggcaggggggtgtctgggccagagttatgaagacttgagccatgcaggcacctcccggtaatgacagctgctccctccagccccaccaaggccagcctgtatggagccatcctcttcaccctccagcagacccgctggctcccagtgtccaaagccagcctcatcttcatcttcaccttgttcatggtgtcctgtaaggtaagcctttctcttcttgcagcattcttgccttgaccaatgccaccctgccacctccaggttgggagtggggaaattggacactcccagccttatgtggctgggacaggcagcccagagaggggagatgcttgccagtaggtcactgggaagagagtttaaaaggcagtgtccagcagccaggacacagatgagaggaacaggccttctgtgtaaaggacccagcctgagccagggtcaaggtgggcccactctcttgggtacagagaccagagggacaagaagctgaaatggcagcatcaggtacccaggaactcagttggaccaggaatacttctagtctgacagtcatgccttgagttgacatcaccccacccaggaggggtcttcaggggctgggctctctccctctgcatgaagatcttagctcagggctgtgtcttccctgggtgaggactccagggctgtcaaaagggagtgagcatgtcttcctgcattaggcgagaagggagaggcaagcagatggctgggatcctgtcctgctatgtttgtagctctaccccaggccaaatgtcttagtccattcaggctgctgtataacagaatgcagtaccatagactgggtggcttagaaacaacagaaatttattcctgggcaggcacgggggctcatgccaacacttcagggggccaaggcaggcagatcacttgaggccaggagttcaagaccagcctgggcaacatggcgaaaccccatctctcctaaaaatacaaaaattagccaggcgtggggtcacatgcctgtaatcccagctactcgggaggctgaggcaggagaatcgcttgaacccgggaggtggaggttgcagtgagctaagatcgcaccaccgcactccagcctgggcaacaaattgagactctgtctcaaaaacaaacaaacaggcaaacaaaatacaaatacaaaaattaaccaggcgtggtggcgcatgcctgtaatcccagctacttggatggctgaggcatgagaattgcttgaacccaggaggtggaggctgcagtgacctgagatcatgccattgcactccagtttgggcaacagagtgagaccctgtctccaaaaaaaggaaaaggaagaaatgtatttcttacagttctggaggctgggaagtccaagatcagggtactagcctggtcgggttctggtgagggccctctttactggttgcagataggcagcatctcactgtgtcctcgcatggtggaagggactggttagctctcctgggcctctttataagggcactaatgtctttcctgagggctccacccttatgatctaattacccctccaaaggccttacctcctaataccatcacctttgtgataggtttcaacatatgaatttgggaggacacagaccttcagacctgcacttagcacagcttttctctgagcccaggtgtcgtggggaattctgggggatgggtgaccagcagtctcagtgtgcttggaactttccaggggtcaacacttgaaatctggcatcctgggaaacctgagatggtcgcccatcatcctgggggtgcatgcagccagagggctgggtctgggctacctccaaccttgactttgatgacattctctcccctcttctccccaccctgccctccactcctttgctttctaccttggtctccctctgtctctcttgctgtctccctggccaccccacctcaggtgtttctgacagccacccactcacacagctccccctttgatgccctggagggctacatctgccccgtgctgtttggttcggcctgcgggggtgaccatcaccacgacaaccatggtgggtcccacagcggtggtgggccaggagctcagcattcggccatgcccgccaagtccaaggaggagttgagcgagggctccaggaagaagaaggccaagaaggcggattagggggtggcccaaggggcaccggggagaggacccggacccaggaccctctgagctgggaggcttcctgcgctcagatctatcctttcctggccttgacttccccatctgcaaatcagggtcattggctcaccctccagggctgatgtgggggttgagatatggggatgaggatgaagaacttttgtagaaatcggggttccctctttctctctgccaggaccccatagagtcacagcttttggaggggttcacagaatcctggcagcagctccagtcaagaatgtcactggttggcatgatattcttagttgtatttttccttctttaaaattgcatcttgaccaggcacagtggctcatgcctataatcctagcactttgggaggccgaggcgggcagatcacctgaggtcaggagttcaagaccagcttggccaacatggtgaaaccccatctctaccaaaaatacaaaaattagccagacgtggtggtgcacgcctttaatcccagctactcgggaggctgaggcaggagaatcacatgaatccaggaggtggaggttgcagtgagctgagatcttcccactgcactccagcctggccaataagacctgtctccagcaagaccctgtctcaaaaaaaaaaaaaaaaattgcatattgactcctgaagaacttcaagccatgttgagatccattcatttgatggacattttctaagtacctgtgagccaggtgctgccatttcaaagtctcttcttaccacgctcctcagtggctagacattttcacgtggccagaaagtcccgactcttgctgggcgtccctggacaagttgccttcctcctctgagcttggcgctccccatctgtatagtggagacccttggcccccctctgtacggaagggccgatgcgaagctgcagttaaaaaaggctcacatgctcctagcctcgtgcagtcaggaggggagaccaggacagttggaaattatgattgcaaatggctttgcattttagatcattcgtgtgtgtggatcagagaaacgcacaagttccctggcacaaaggaagccctcagtagacacgtctagggcaggcttgagagatcagatggcgtgaaaggcttgtgatctgttcgtctcaggctccccctaaaccaaagaaatggaaacagctggttggggttccacgatccagctctatcaaggggctctgagtgtgcacagttgggacctggatgtatcaggtctccctcaggctggagtccactgtcactcattcagccattgaacaaacatacagatgcttacctgctctgtggtcagccttgtgctgctgctgggcgggccaggagcctgcttcagtgtgagcgaggtggatgatattatagctgaagggtccctcctggtcaccctcatctcagcctaggtcaccaggatgtctgagaggggtgggtgcatgggacgggcgtggccagtctcaggtgaggtttgggcccagacctcgttggagtcccagacgttgccaggctgttggaaaattgccttgttcctgtgatgcctgggagttaggtgggtcctggggaggtttcatcctcttgcttgtccacctcagctcggtgtggaggggcagccaataaatcattgtgaatgaaccctcatggcttgtctgatttatgcctgggattttgttttttgtttttgtttttgtttgagaccgagtctcactcttgcccaggctggagtgcagtggcccgatcttggctccctgcaacctccacctcccgggttcaagcaattctcctgcctcagcctcccgagtagctgggataataggtgcccgccatcacacctggctaatttttgtatttttagtaaaagcggggtttcaccatgttgccatgctggtcttgaactcctgacctcaaatgatccacccaccttggcctcccaaagtgctgggattacaggtgtgagccactgagcccagccacatgcctgggattttggcctcaagatgtggggatggctgggcatggtggctcatccctgtaatctcagcactttggagggctgaagcgggcagatcacctgaggtcaggagttcaagaccagcctggccaacatggtgaaaccctgcctctactaaaactacaaaaattagtcaggtgtggtggcaggtgcctgtaatcccagctactcgggaggctgaagcaggagaatcgcttgaacctgggaggtggaggttgcggtgagctgaggtggagacattgcactccagcctggacaacaagagcaaaactcattctttaaaaaaaaaaaaaaaaaaaaaaggctgggcatggtggctcacacctgtaatcccagcactttgggaggccaaggcaggtggatcacgaggtcggtggatcacgagttcagtagatcaagaccatcctggctaacatggtgaaaccccatctctactaaaaatacaaaaaatcagctggatgtggtggcgggcgcctgtagtcccagctacttgggaggctgaggcaggagaatggcgtgaacctgggaggcagagcttgcagtgagcggagatcgcgccacagcactccagcctggcagacagagcgagactccatctcaaaaaaaaaaaaaatgtatactgtgtacagtatacattacatacattatatgaaatcctagaaaaagcaaactaatgtataattacagaaagctgatcagtgggtgcttggggaaaggcaggtagggtggggtgggcaggagggattttgaaggggcaaggggacatgagtgatgagtctgttaacttctttgattgtgttagtttctcgggtctatacacatgtcagaacctattacattgtacattgcaaatacacacagtacctcatttgtcagtgatgcctcaataaagctgtaaaaaagaacccttcaattataagggaaaaaagtgcgagcttggtggctcacgcctgtaatcccagcactttgggaggctgaggcaggaggatcactggagcccaggagttggtgatcagcctgcacaacatagtgagactctgtctctacaaaaaaaaatttaaaaattagccgggggtggtgactcgtgcctgtaggcccaggcactctggaggttgagtggggaaaatcacttcagcccaggaggttgaggctgcagtgagctaagattgggccactgcacttcagcctgggcggaacagtgagaccctgtctcaaataaataaataaaataagaataaagtagaaaaaaactccacaccaaattgggcaaaagaagctgggcatggtgactcacacctgtagtcctagctactctggagaccaaggcaggaggatcacttgagcccgttaggtggtgtccaacctgggcaacatagcaagaccctgtctcaaaaaaaaactgggcaaaagatttgaatagacaccaccaaagaaattatatggttggcagatatcatataaattgcacattaaaaccacaagcatatgccactgcatacctgttatgaattgaattgggttcctctcaaattcatttgttgaagtcttaacccctaaggtattagggggtgggacccttgggagatgattaggtcatgagggtggggctctcataatgggattagtgcccttacagaagaggccccaaagaaacactttgctcttcctaccatgtgaggacacagagagaagacacgtatgaaccaggaagccggcccttaccacacagtgaatctgccagtatcttgatcatgaacttcccagcctccagaactgtgagaaataaatttccgttgtttataagccaccattttctagtattttcttgtagcaccctaaatggactaagacaggagataaggcctttttttttttttcttttggagatggagtttccctcttgttgcccaggctggagtgcagtggcgccatctcagctcactgcaatccctgcctcccaggttcgatcgattctcctgcctcagcctctgggattacaggcatgtgccaccacgcccagctaattttttgtatttttagtagagacagggtttcaccatgttggccaggctggtctggaactcctgacctcaggtaatccacctgcctcggcctcccaaagtgctgggattacaggggtgagccaccgcacccggcctaatttttttgtagagttggggtctccctatgttacccaggctggtctccagcttctggctcaagtgatcctcttgccttggcctcccaaagtgctgggattacaagcatgagccactgctccccgccaccttttagaatggataaaataaaaataaccgacaatatccagtgtaggtaaggatttgggggcagctggaactcacacactgctggtgggagacaattggacagtttcttttaaggttttttatgtttttaaaatttttaattttttacatttttttttgagacagggtattgctctgtcgcccaagctggaatgcagtggctcaatcttggctcactgtaacctccgcctcctgggttcaagcgatccttccacatcagccccctgagtagctgggactacaggtgcatgccaccatgcctggcaaagttttgtattttttgtagagtcggagtcgtgctctgttgcccacactggccttgaactcttgggctcaagcaatcctcctgcctcagcctcccaaaatgctgggattacaggcgtgagccaccatgcccagtcagatacacatcttcagccatgagaagaatgcaaatcaaaaccacagtgagttgtcacttcacatccaacaaaatggctaaaattaaaatgacaatatggtcattttagtgctggtgaggatgtggagcaataggaactctcatatgctttggtaggaaggtaaaaaggtgcaaccactttggaagacaatttggcaggtttttttataagttaaacatagaagccaggtgcaatcgcttacgtctgtaatcccagcactttgggaggccaaggtgggcagatcacttgagttcaggagttcgagaccagcctggtcaacgttgtgaaaccctgtctctgctacaaatacaaaaaattagccaggcgtggtggtgtgcacctataatcccagctacttgaaggctgaggcgggaggagcccttgaacctgggatggggaggttgcagtgagctgagattgcaccgctgcactccagcctgggtgacagagcaagattctatctccaaaaaaaaaaaaaaaaaaaaaaaaaaaaccaaaacaaaacaaaacaaaaaacaaaatgttagcctggcacagtggctcacccctgtaatcccagcactttgggaggccgaggtgggcagatcacttgagatcaggagtttgagatcagcctgaccaacatggtgaaaccccaacaaggtgtaattttgtaaaaatacaaaaattagccaggcatggtggcacctgcctgtaatcccagctactcaggaggctaagacgggagaatcacttgaacccaggaggcagaggttgcagtgagctgagattgcgccactgcactccagcctgggtgacagagcaagactccgtctcaaaaaaaaaaaaccaacaaaacaaaaacactataagttaaacatagggtggtcatgggtgactcacacctataatcccagggctttgggaggtgcaggacggaggactgttttagcccaggaggttgaggctgcagtgagctgtgatggtgccactgtactgaagcatgggtgacagagcaagactctgtctttaaaaaaacaaaaatgtgaataaatgaacagctgtgctccgcccatagtattgcctactgttcagcgaaaaaaaaaaaaaggcggtggaggtggtgaacatgcaaaaacatgaatgagtctcgaatgtatccagattggtgggaaaaagccatacaaaaaagaatgtgtaatataggcatccatttatctgaaatcctagaaaaagcaaactattgtaacagaaagctgatcagcatgtggttggggaaagaaggacagggtagggcaggtgagaggaattttgcagtggcaccaggaaactcgggtgatggatctgctgatggctttgattgtgctggtttcttgggtctatacccatgtctgaatctattaaattttacttttgggtttttgttttgttttgttttttgagatggagtcttgctctgtcacccaggctggagtgcagtggcacgatcttggctcactgcaacctctgcctcctgggttcaagtgattctcctgcctcagcctcctgagtagctgggattacaggtgcccaccgccatacctggctaatttttgtatttttagcagagacagggtttcaccatgttggccaagcttgtctcaaactcctaacctcaggtgatctgcccgcctcggcttcccaaagtgctgggattacaggcgtgggccaccgtgcctgtgcctggtctaaattttgctttgattacttaagatttaaaaaaaaattaacttttttcttatttatttatttagagagacagagtctcgctctgtcgcccaggctggagggcagtggtgcaatcttggctcactgtaacctctgcctcctgggttcaagcaattctcctgcctcaacctccagagtagctgggattacaggtgcccaccaccacgcctggctaatttttgtatttttagtagagacggttttgccatattggcccggctggtctcgaactccttgcctcaaatgacccacctgcctcagcctcccaaagtgctgggattacaggcttgagccaccacgccggcctcttttttatttatttttaattaattattttttacttctttttttcccactcattcaacctaagtacttaaaagttttcattttatatatgcatagttcatctatcagttatgcctcagtaaagctataaaaaaagaagctttcaattataaggaaaaaaagtctgggcatggtggctcatgcctgtaatccccgcactttgggaggccgaggccaaaggatcacttgagctgaggagttcatgaccagcctggccaacacagtgagacccagtctctgcagaaaaaaaaaaaaaaaaaaattagccagttgtggtgatgtgagcctgtaatcccagctactcaggaggcagaggtgggaggatcgcttgagcccaggagttcgaggctgcaatgagctgagattgcaccactgcactccagcgtggatgacagagtgagaccctgtctcataaataaatgaataggctgcagtaacatactccagacagagtcgcttaagccacagacatttatttttccctaattcttgagggtggaagtttgacatcaaggtgtcagttggttttgtttctcaaggcctctctgcttgggtggcagacggccgccttctctgtcctcgtatagtcttccctcttcgtatgtctgtatcctagtctcctctgcctacgaggacaccagtgaattagatcagggcccacctatagactttttttaaaacttaattatctttttttttttttttgagatggagtctggctttgtggcctaggctggcgtgcagtggcgccatctcggctcactgcaacctccacttcccgggttcaagtgattctcatgcctcagcctcccgagtagctgggattacaggcacgtgccaccatgcctggctaatttttgtatttttagtagagatggagtttcaccacgttggccaggctggtcttaaactcttgatctcaagtgatccacccacctcagcctcccaaagtgctgggattacaggcatgtgagccaccctgcttgactgactattttaacttaattgtctctttaaagaccttatctcaatcagtttggtgctaaaaaaatttaaaaaaaaaagaccttatctcctgttttagtcctttcagtgtgctacaacaaaatactataaactggtggcttgtaaacaacagaaatttatttttcatggttctggaggctgggaagttcaagatcaaaatgctggcagattcactgtctggtaagggctggctatctggttcacagatggtgtcttcttttggtgtccccacatggtagaaagatcaaggagtttcttgggggcctcttgtggaagggcactaatcccattatgagggccacatcctcatgacctaatcacctcccaagggccgcacctcctaataccatcaccttggggctaattttggactcaggtgatcttcctaccttggtctcccaaaacaaagggatgtgagtctctgtgtccagcgtcctttaaggatggattaaattaaagtaactgacaatgcctggtgcaggtaaagatttgggggcagctggagctcgcacactgctggtgggagacaattggacagtttcttttaaatttatttatttatgtatttatttgagatagggtatcactctgtcatccaggctggagtccagtggtgcagtcataggtcacttcagcctcgacctcctgggctcatgtgatcctcccgcctcagccgcttgagtagctgggactacaggcacacatcaccacatccagataatttttgtattttttatatagatgatgtctcgccctgttgcccaggctggtctgaaactcctgggctcaagtgatcctcctgcctcagcctcccaaagtgctgagattacaggtgtgagccaccttgcccagactgatagtttcttattaaattaaacatcacttaccctataaacacaacaatccctgatagtttcttattaaattaaacatcacttaccctataaacacaacagtcccattgtggtgaaacaaaaattcacctattttttttttttttggtaatcaccaaaaactgggaacatcccaaatgtccatcagttggtaagcggatgagccacctggtttatgcatgtgatggaacattacacagcaatgaaaaggagtgaccttctacagcagtgtggttgaatctcaaatgcatttgctaaatgaaagaatccagacccaagagactgtgtgctcccattggcgggacattttatctttagagatggggtattgctttgtcacccaggctggagtgcagtggcaggaacatggatcattacagcctcaaattcccaggctcaagggatcctcccgcctcaccctcctgagtggcagggattgcaggtgcgtgccacatactcggctgtaggtcattttagaaatacaaaattttgggctaggtgcagtggctcacacctgtaatcccagcactttgggaggccgaggtgggtggatcatttgaggtcaggagtttgagaccagcctgaaaccctgcctctactaaaaatacaaaaattagctgggggtggcaggtgcctgtagtcccagctactcaggaggctgaggcaggagaattgcttgaacccaggaggcagaggttgcagtgagctgagatcgtgcaccactgcactccagcctgggtgacagagcgagactccgtctcaaaaaaaaaaaaaagaaaagaaaaggaaagacaaaattttaagtatagaaaacagatcagtggctgccaggagttgagatggaaggagagattatccacaagagagacagaggaattttgggagggaagggactgttctgcatttttaacgtggcagtagttacacaactgtatatgtttgtataaacttgcagaattcgcccggcagcgtagcccttttgggaggctgaggtgggaggatcacctgaggccaggactttgagactagcctgggtatcatggtgaaaccccatttctgcaaaaaatacaaaaattagccgggcatggtggcatgtgcctgtagtcctagctactcaggaggctgatgtgggagaatcacttgagcctgggaggcagaggttgcagtgagccgaaattgcaccactgcactgcagcctgggcaacagagccagacctgtctcaaaacaacaaacaaaaaaacaaacaacaaacaaaacaaaaaacccacaaagaaacactacaaaaaaaaccttgcagaattttgtggctaaattctaccttaatctaaaaagaaaaggaaaaagagagcagcctttggggtttcccaaatctgttcaaatcctgtctttgtttttttttttttttttttttttgacagattctcactctgttgcccaagctggagtgcagtggtgccatcttggctcactgcaacctccgcctctcgggttcaagtgattctcctgccacagcatcccgtgtagctgggattgcaggcaagagccaccatgcctggctaatttttgtatttttagtagagtcagggtttcaacatgttggccagggtggtcttgaacttctgacctcaagtgatcctacccgcctcggtctcccaaagtgctgggattacaggtgttagccaccatgcctggccaaaccctggcttttaatctccgagatacgtagcttgggcaagtaactccccttctctgagcctcaatttcctcttaggatggctaggaggagtgactggaaagtccttggcacaaagtgaggtctggagttgggacaaaagctgcctctgtcaaagtgctcacagaacccctggtcgggttcatttagcatctggtgggtgttggagataagtcggctccctgccttctggcactaatgttctgagatctcattttccaagagaacagattgtaccaaaatagcctcccagcctagtctgcgaagggggtgtgcaagccactggccaggtggagaatgattggcggggcaggctggggctgttgtcccagtgtgggtgtgagaacttggaggatcggctctcaaagtccaggctaatttggctgcaagttacactcagtaacttccttggtcttggaatgagagaaagtttctttttatcctttttaaaaaaaattgtggtaaaatacacaacataaaacttatcatcttttttttgtttgtttgagacagggtcttgctctattgcccaggctgaagtgcagtggcacaatcacagctcactgcagccttgacctcctgggctcaatccatcctcccacctcagcctcccaagtagctgggactacaggtgtgcaccaccatgcctggctaatttttttgtatttttagtagacaccgggtttcaccatgttgcccaggctggtctcaagctcctgagctcaagcaatccacccaccttggcttctcaaagtgctgggattacaggcatgagccaccacacatgtcctaaatttcttagccacatttgagtgtatacttcaggggcattaagtatattcacattggctaggcatggtggcccatgcctgtaatcccagcactttgggaggccaaggcgggtggatcacttgaggtcaggagttcaagaccagcctggccaatatggtgaaaccccatctctactaaaaatacaaaaattagctgggcgcagtggcacgcacttgtaatctcagctactcaggaggctgaggcaggagaatcacttaaacccaggaggcggagtttgcagtgagcccagactgtgccattgtactccagcctgggcaacagagcgagactccatctaaaaaaaaaaaagtatattcacattgttgtgcaaccaccaccattacccagctccagaaatcttttcatcctgcaaaggtacccattaaacactcactccccacttccctcttccagcccttggcagcaccattgtactttgtctctctgaatttgatgactctaggaacctcatataggtacaatcatacaatacaggtgctctccgatttacaaattacaattttcttgagtttacaatgtttcaaaagaggccaggtgcagtggctcacgcctgtaatcccagcacttcgggaggccgaggcgggtggatcacctgaggtcaggagtttgagaccagcctggccaacatggtgaaaccctgtctctgctaaaaatacaaaaaaaattagccaggcatggtggtgggcgcctgtaatcccaggactttgggaggccgaggtgggcggatcacctgaggtcaggagtttgagaccagcctggccaacatggtgaaacctggtctctactaaaaatacaaaaaaatttgccagacgtggtgggcacctgtaatcccagctacttggaaggctgaggcaggagaatcacttgaactggggaggtggaggttgcagtgagccgagactgtgccattgcactctagcctggacgacagagcaagactctgagactctgtctcaaaataaataaataaataaaataaaaataaaaataaacaaaaaataaatgtttcgaaagagattcacattcagtagaaaccatgcttcaagtacccacaccaccattctattttactttcaggacagtatttaataaattacatgagctattcaacactttattacaaaatgggctttgcgttagttgattttgcccaagtgtaggttaatgtaagttttctgaccatgtttaaggacaactaggtgaagctatgatgttcagtaggttaggtgtatggaaatgcctttttttttttttttttttttggagacaggttcttgctctgtcgcccacgctggagtggtgcagtggtgcgatcttggatcactgcaacctctgtctcctgggctcaggtgatccttccactcagactcctgagtagctgggattacaggtgagcaccaccacgctggctaattttttgtatttttagtagagatggggtttcatcatgttgcccaggctgacctcgaatttctggattcaagtgatcctcctgcctcggcctcccaaactgttgggattacaggtgtgagccactgtggtgcaattatcccacactacagcttcaaactcctaagttcaattgatcctcctgcctcagcctcccaagtagctgggactacaggtgtacaccaccacacctggctaatttttaaatgttttgtagagatgaggtcttgctatgttgcccaggctggtcttgaactcctggcctcaagtgatgctcccactttggcctcctaaaatgctgggattacaggtgtgagccaccatgcccagccataagcaggtattttacatataatagatcgtcaaggtggtttgttaccctcattttgtggaaaataaatgaggctgggtgctaaggtgagtggaggtcagtcacctcttactgacagtgggtcagaattgaaatccagtcttggtgcagtagctcacgcctgtaatcccagcactgtgggaggccaaggcaggcagatcacctaagttcaggagttcgagaccagcctggccaacatggcgaaaccccgtctctactaaaatacaaaaaatcacccagacaaggtggcacatgcctgtaatcccagctcctcgggaggctgaagcaggagaattgcttgagcctgggaggcagaggttgcaatgagccgagatcacgccacagcactccagcttgggtgacagaatgagtgaaactccatctcaaaaaaaaaaaaaaaaaaaaaaaagaattgaaatccaggcccatctcattctaaagctatgctttttcttgcacatttcacttctctgattctctttaggaatatgtaagatacatgcatggaacaattcagcattatccttgacactgagcaggcatcagcaaataatacctagagcaggcattagcaaaggcaagttcttatcctgctctcctggttcctagatcatcatccctggtgaccacagacgtgggtggttatgactgcgtttacactgtgctttcctgttagcgcctgcctgaaggcatgtaggaaaactcccagctcaattagtggaggaaattgaggccattgaagccagctgagaggtgaaagtgactgcacaaagacagatgttggcaggcctgagtgtgagctctggttttgcaactaacttgcgtgtgacctttggtgaacccttcttggctgattgaaaatgttgaactaggccggcccggtggctcccaaagtcctgtaattccagcactttgggaggcctaggtgggcagatcacttgaggtcaggagttcaagaccagcctggccaacatggcaaaacctcatctctactaagtacaaaaattagccaggtgtggtggtgggcacctgtaatcccagctactcgggaggctgaggcaggagaattgcttgaacccaggaggcggaggttgcagtgagccgagatcacaccactgcacttcagcctgggcaacacagcgagactctgcctcagttgaaaaaaaaaaaaagaaagaaaaatgttgaaccaggcaggtcaagagtgtgtaaaccatggcccaagggccaaatctggcccctacttgtgtttgtaaataaaattttcttggcacgcagccatgctcatttgtttacttatcgcctatagagatttattattattattattattttcttttttgagacggagtttcgctcttgttgcccaggctggagtacagtggtgtgatctaggctcactataacctccgcctcccaggttcaagtggttcttttgcctcagcctcccaagtagctggggttacgggcacctgccaccacgcccggctaatttttgtagttttagtagagacggggtttcaccatgttgaccaggctggtctcaaactcctgacctcaggtgatctgcccgcctcggcatcccaaagtgctgggattacaggcctgagccactgtgcctggtacctatagtggatcttgtgctacaacagcagagttgagtgatttcaacagaccaccttacctgcacagctgaaaatattcactctctggccctttgcagaaaatgttggccaacccctggactggatgatgctgaagatcccttctaactctaaatatctgaattcatagaggaagtgaacattgcaattaactaggcaaaaaccaagagaaatttatcaaactctgagctgcacaaatgagtatctcaccatcccgcaaatgtccatgtttcctcaacagaaactgaccatggggctgggtgtggtagctcatgcctgtaatcccagcactttgtgaggcagaggaaggaggatcacttgaggccaggagttcggaccagcctggccaacatggcgaaaccccatctctattaaaaatacaaaaattagccaggcatggtggcacgtgcctgtaatcccagctactcgagaggcagaggcacaagaattgcttgaacctgggaggcagaggtcacagtgagctgagatcgtgccactgcactccagcctgagtgagacagtgagactctgtctcaaaacaaacaaaaacaaaacaaaacaaaaacaacaacaacattggtctgaggccaggcatggtggctcacgcctataatcccaacatttagggaggataaggtgggtggattgcttgagccccggagtttttgagaccaacctgggcaatgtagcaagaccccatctttacaaatatgaacaaaaattagtctggcatgctggcgtgtgtctgtggtcccagctaacttgggaggctgaggtgggagggtctcttgagcctgggaggcagaggttgcagtgacctgagattatgccactgcactccagctttggtgtcaacgtgagaccttgtttcaaaagaaaaaaaaaagtctttggtctgtcttacactgggaatggttctactcattcatgcctataacatgcattgatcatttggaaaatattagttcaatgagtgatgcagatgttgtcccattacattattttgtatcaaaaaagtcctcttcattaatatcactattcatctcatcagaaaagtgtgcagccgtgcaatcatagctcactgcagccttgacctcctgggctcaaatgatcctcccacctcagcctccttggtagctgggactgtaggcgcacatgccagcacgccgggataatttttttaaaaaactttttatagagacagggtttcactttgttgcccaggctggtctcaaactcctgacctcaagtgatcttctcgcctcagcttcccaagtagctggggttacaggcttagaaaagtctttaaatgtcaagaagctgccaaactcacagtggtggctacacattttccaaaattctgatttctccttaaaagcttgaattttattgtgggcaacaaaacctgaaattgttttccttgaagtgacagcctcattttgttcatttttgagaaaatgtctgccaagcagccacatctgaatcacagtttgtcagacatttccagtaaaaatggtgttacccgagaaaggccactagcttggctgtggaggcagcaaaccatcattcaatcacgttttctagagatgaccaaggactgaatcctcagcaggggaattttatgtggacctcccgtattgctagtcagaatatgaaaaagacatgccctctcctgttatggggcaaattgtgtcccccccaaaagatatgttgaagccaggctgggcacagtggctcacgcctgtaatcccagaactttgggaggcttggagtgggggggggggggtggatcacaaggtcaggagttcgagaccacactggccaacatgacaaaaccccgtctctactaaaaaaaatacaaaacttagccaggcatggtggcaggcacctgttattcagctacttgggaggctgaggcaggagaattgcttgaacctgggaggtggaagttgcagtgagccgagatcgccccactacactccaacctgggcgacagagtaagactctgtcacaaaaacaaaaacaaaacaaaacaaaaacaaaaaacaacttcctattgggtactgtgttcactatctgggtgacgggatcaatggaagcctaaacctcagcatcatgcaatatattcttatgacaaacctgcacatgtaccccctgaatctaaaataaaaatggaggccgggcgtggtggctcacgcctgtaatcccagcactctgggaggctgaggcaggtgaatcacctgagatcaggagttcgagaccagcctggccaacatggtgaaaccccgtctctactaaaaatacaaaaactagctgggcatggtggcaggcgcctgtagtcccagctactgggaagggaggctgaggcaggattatcgcttgaatctgggaggcagaggttgcagcaagccaagatcatggcattgcactccagcctgggcgacaaaagcaaaactccgtctcgaaaataaataaataaataagtaaaataaaaatggaaatttaaaggaagaaagaaatggtgcttactgtctgtgtcctcacatggcggaatgagagaaagcagctctctgggacactctctcttgttttttgctgtttttgagagagtctcactctgtcccctaggctggagtgcatgagtgagattgtaactcacagaagccttgacttcctgggctcaagtaatcctcccacttcagcctcccaagtagctgggactacaggcgcgcaccacctcgcccagctaatttttgtgttttttggtagagacagggttctgctacattgcccatgttggtcttgacctcctgggctcaagtgatacttccactttggcctcccaaagtgctgggattacaggcatgagccaccgtgcccggcctgaacctgtctattttcacctgatgtgttatcctaggatattttctgcagtgttacacggtgtctgtgaacaatttgataggtagtggccagccacatgtgcccatttacattaacacgaatgacaattacataaaatggaaagccctccttcttggtggaattagcatcctttcaagtacttggtcaccacacgtggctggcggctgctggacagctcccatagggaatattcccatcattacagaaagttctgtcagacagcgcctccctagaaaattcctaatcaacacctaaaaataaaaatgaggtcacaggcaagtcgcagtggctcacgcctgtaatcccagcactttgggaggctgaggcaggcaggtcacttgaggtcaggagtttgagaccagcctggccaacatggcgaaaccccctctctagtaaaaatacaaaaattagccaggcgtggtggtaggcatctgtaatcccagctgctcgggaggctgaggtggaaggatcgcttgaacccaggaagaggaggttacagtgagccaagattgtgccactgtactccatccagcctgggtaacagagtgagacccccatctcaaaaaaaaaaaaaaataggtccctataatacattcatgtgggaaaaaattcagagctatgaaggcgggaggagtgcaaggcaagttggcccccagtacccctccgcagacatccctttttccccttactcaaatatccttttagaaatattctttccagttgggcgggcatggtggctcatgcctgtaatcccagcactttgggaggctgaggcaggaggatcacttgagcccaggagatcaaggctgcaaggtaaaaacgaggtaggtgtgggagctcatgcctgtaatcccaacactttgggaggccaaggcgggaggattggttgaccctaggaattagaaaccagcctggaactgagctgtgatcacgtcaccgcactccagcatgggtgacagaatgagaccctgtctcaaaaaaaaaaaaaaaaaaaaaaagaaactattttcatatgtaaccatgcacctcttttgcatcttgttttttctttctttttcttcttcttctccttctcctccttcttctttttttgtttttgagacggagtctcgttctgtcgcccaggctgaagtgcagtatcgggatcttggcccactgcaagctccgcctcccagattcaagcaatttctcctgcctcagcttcccgagttgggactacaggcacccgccaccatgcctggctaatttttgcatttttaatagaggcgggtttcaccatattggccaggctggtcttgaactcctgcccttgtgatccccccgcctcagcctcccaaagtgctgtgattacaggcatgagccactgtgcctgcctttctttttcttctgcttctttttttttttttttgtgtgtgtgatagactggaatgcagtggtgtgatcacagtttactgcagccttgaactcctgggttcaagcagtccttctgcctcagcctccaaaagtcctgggattacaggtgtgagccattgtgcccggccttttttcttttctttctttcttcttttcactatctattttggaaatttttccttattagtaccacagtggtacctctgaaggatctagggcaagattcttttttttttttgagatgaagtctcgctctgtcgcccaggctggagtgcagtggcacgatctcggctcactgcaagctccacctcccaggttcacgccattctcctggctcagcctcctgagtagctgggactataggcgcccgctaccacgcccggctaattttttgtatttttagtagagacggggtttcactgtgttagccaggatggtctcgatctcctgacctcgtgatccacccgcctcggcctcccaaagtgcggggattacaggcgtgagccaccgcacccggccgattcttttttttgttttttgatacagagtctcactctgtcacccaggctggagtgcagtggcactatcttgggttccactccacctcccgggttcaagtgattctcctgcctcagcctcctgagtagctgggattacaggcataggtccctaccacctggctaatttttgtatctttaatagaggaggggttttaccctgttggccaggttggtctcaaactcctgatctcaggtgatccgcccacctcggcctcccaaagtgctaggattacaggcgtaaaccaccctgcccagccaagaccccatctctattttaaaaaatacaaaaattagccgagtgtggtggcacatacctgtagtcccaactactcaggaggctgcggcaggaggattgcttgagcccaggacgtcaagggtgcagtgagccatgatcacgccgctgcactgtgaatgtgcccttatttagagataggatctttgcagatttaactaaattaaggaatttgagatgagatcattatagattgtctagatgggccctaaatccaatgaaaatgtggaattttgagagagcaagaccatgtctcaaaaaaaaaaaaaaaaaaagggccaggcagggtggtataatctcagcactttgggaggccgaggcgggcggataatctgaggttggaggttcaagaccagcatgaccaacagggagaaaccctgtctctactaaaaatacaacagtagccgggtgtggtagcgcatgcctgtaatcccagctccttgggaggctgaggcaggagaatcgcttgaacccgggaggcggaggttgcagtgagccaagatcgcaccattgcactccagcctgggcaacaagagcaaaactccgtctcaaaaaaaaaaaaaaaaaaaggaaataggatctttgcagatgcaaagatgtaattaagataaggttatattggtttagggtgggccctcctctcacccacaaccctccaaaagtaaactatgaacagtcctttttgttatgcacatataaacacatatacagaggccaggctcggtggctcatgcctgtaatcccagcacttttggaggccgaggcaggcggatcacttgagatcaggagtttgagaccaacctgaccaacatggtgaaaccctgtctctactgaaaatacaacaattagctgggcgttggggaaagagttcgtttgtttggacaacacgcttcctttggcactttgctcttatattgatgggacataaacatttttttgtggcaatgctctgaagatctaattcatttatttcaatgcctgcaggtaattccattgatggggcataatttatttatccaatctcctattgatgtcatttatttatattattactaaatttctgaaatttacatttcagaaatttacaaaatttcttttcttttcttttttagatggagtctagctctgtcacccaggcggaagtgcagtggtgtgatctcagttcactgcaacctccacctcccaggcttaagggattctcctgcctcagcgttctaagtagctgggatcacaggtgtccaccaccacgcctggctaaattttttgtatttttagtagcgatggggttgcaccacgttggccaggctggtctggaactcctgacctcaggtgatccacccaccttggcctcccaaagtgctgggattacaggtgtgagctactgtgcccagtaacatttacaaactttctttctttctttcttttgttttttgagatggagtttcactcttgttgcccaggctggagtgcagtggcgtgatctcggctcactgcaacctctgcctcccaggttcaagcaattctcctgcctcaacctcctgagtagctgggattacaggcacgtgccaccacacccagctaattttttgtatttttttagtagagacggggtttcaccatgttggccaggctggtctcgaactcctggccttagatgatcctcctgcctgcttccccgctcacaggcgtgagccaccacgccaagccccaaaatttctaatttttgatattatgattgatgctgggatgttgggttctggaaccagactacctgagtccaaatcacacctcagccatttacaagttatctattgctgtgtaacaggtgttcaccaaaacttagccacttaacaaatatttattatctcatggttttcgtgtgagagaaattcaggagcttagctgggtggtttaggctcgggatctctcctgaggttaccatcagatgtcagccagagccaggcgcagtggctcatgcctgtaatcccagcactttgggaggctaaggcaggcgggtcacctgaagttaggagttcaagactagcctggccaacatggtgaaacctcatctctactaaaaatatataaattagccgggtgtggtggtgtgcatctgtaatcccaggtacttgggaggccaaggcaggggaatcacttgaacctgggaggcggagattgcagtgagccgagattgcaccattgcactccagcctggatgatacagagaaactgtctcaaaaaaaaaaaaaaaaaaaaaaatgtcagccagggctgcaactatctgaagacttgactggggctggaggatccacttccaaaacgtcacccttagctggcgtttggctggaggtctcagttccttaccacatgggcttttgcacaagctgcttgaattttatcatgacatgacacctaacttccccagagcaagcaatccaagaaagcaaagaagacctagtaccatttctgatctggtctgagtcaaacaccatcacattgctttattcaagtcactaagtccagcccagagtcaaggagaagccaattaggtgttattctcttttctttctttctttctttctttcttttttctttctttccttctttcttcctttctttttctttctttctttcttttttctttctttctttccttctttctttctttctttttctttctttctctctctctttctttctctatttttctttttccttccttccttctctttctccctttccctcccctcccctcccttcccctccccttctcttcccttcctttcctttttttgagacagagtcttgttctgttgcccaggctggagtgcagtggcgtgatcttggctcactgcaacctctgcctccaggtttcaagtgattctcctgcctcagcctcccaagtatctgtgattacaggcaaatcttggctcactgcaacctctgcctcacagattcaagcaattcccctgtctcagcctcctgagtagctgggactacaggtgtgcaccaccacgcccagctaagttttgtatttttagtagagacagggtttcaccatgttggccaggatggtctcaatctctcgacctcgtgatccgcctaccttggcctaccaaagtgctgggattacaggcgtgagccactgcacccggctagttttttgtatttttagtagagacagggtttcatcatgttggccaggctggtctcgaactcctgacctcaggtgatctgcctgctgcagcctctcaaagtgctgggattacagacgtgagccaccgcgcccagctgatacttagtttcttacatggttgaatctcagagtatttggctgacttgaggcctcttagcttgggcatcattggctgctagaaaatccaaggaccggaattagaggttccgtgcatcctgtaagagtgtaggcaaaattgtgtgcacgtgttatttggtaggaggaggtccaaagcttttattgagggtctcatgtagtctgtgatcccaagaagaatatggctcactgtgcaaaagtgagacctcctgttgtatttgttcccaatgttttctttctttcttttttcttttcttttttttttttttgagacagagtcttgcactgtcgcccaggcaggtgtgcagtggcacgatctcggctcgctgcaacctccacctcccaggttcaagcaattctcctgtctcagcctcctgagtagctaggattataggcgcccgccactgcgcccagctaattttttgtatttttagtagagacggggtttcactatgttggccaggctggtcttgaactcctgacctcatgatccactcgcctcagcctcccaaagtgctgggattacaagcgtgagccaccacacccggcctgtacctgatattttctgatgacaatcttcttccactggagcattggatcttcaatactgaggcacatcttctccctatacaacatacagataaaaaggaagttgaaatcagagagaaataaaaagacattttatattttattccgcttcattttcatttcctttttttttttttttttttaagctggagtctcggtctgtcacccaggctggagtgcagtggtgtgatctcgactcactgaaacctctgcctcccaggctcaagcgattctcgtgcctcagcctcctgagtagctgagattacaggtgcatgccaatacacccggctaatttttgtagttttagtagagacagggtttcaccgtgttggtcaggctgttctcgaactcctgacctcaggtgatccacccacctctgcctcccaaagtgctgggatttcaggcatgagccaccgcgcccagccctgctccattcccttcactgcataccttaataattccttttcggtaatcaggcacattttgaacttttatgaatagatctgtgattattctaagttcttaaattgttctgcagtcttttatgtttattatcataggcatagatggacctatattccttaccatgtcctttattattcaaccagtgtatcctctggttttttgcctatgttattaagtaacctattatctctggagttcatgaagttataatatcatttttattaaactgaatagaatggtatagcaatgacctcttaattacaatttgatttgactgcaaaactttttcctcctctataaggagatgatgtctgctttaagctgtaatgttttgccatgttgcaaaaagccacaataataaattaagtataaaaaaatacctgtcttagggctgagtgtagtggctcgtgcctatcctggctacttgagaggctgaggtaggaggatcacttgagccaagaagttcgaggctgcagtgaactgtaattgtgccattaaactgcagcctggtgatggagggagacctggtctctaaataagtaaattaacaaatagaccagactgagtggctcatgcccgtaatcccagaactttgggaagctgaggtgggaggatcccttcaggccaggagttccagaccagcgtggacaacatagtgagatcccacctcctcaaaaaatttaaaaattagtcaggtgtggtggtgtgcacctgtagtgccagctagtatggaggctgaggcaggaggatcacttgaccccaggaagcagtgagctgtgttcacgctgctgcagtcaagcatgggtgacagaaggagagcctgtgtcaaaaaaattaaaataaataaataaatcttgatattttattcattgtgtagtttctgcattaattttaatttttttttctttgagacgcagtctcgctctgtcgcccaggctggagtccagtgacatgatcttggctcactgcaagctctgccttccaggttcacgtcattctcctgcctcagcctcctgagtagctggaactacaggtgcctgccaccacacctggctaatttttttttttttttgtatttttagtacagatggggtttcgccttgttagccaggatggtctcaatctgctggcctcatgatctccccgccttggcctcccaaagtgctgggattacaggcgtgagccaccgtgcccggcccagtaattttaattttttaaaataatcactaggtgcagtggctcacgcctgtagtcccagcactttgggaggccggggtaggaagatcgcttaaggccaggagttcaagaccagcctggacaacatatcgagatccccatctctacgaaaaaaaaaaataaaaataaaaaaaataaaaaaattagccaggcaggtggcgtgcacctgcagtcctaactactctggaggctgaggtgggaaggttgcttgagcccaagagttcaaggttgcagtgaacaaggctatgctactgcactccagcctgggtgacagagtgagaccctgtctctaaaaatagtaataatttaaaaaaatgtatttaaggccgagtgtggtggatcatgcctgtaatcccagcactttgggaggctgaggcgggtggatcacttcaagtcaggagttcgagaccagcctgagcaacatggtgaaaccccgtctctactataaaaaaaaacaaaaaacaaacaaacaacaacaaaaaaaaacaaaattagccaggtgtggtggcgggtgcccataataccagctactcgggaagctgacgcaggagcatcgcttgaacccgggaggcggagtttgcagtgagcccagattgcgccattgcactccagcctgggcaacaagagccaaactccgtctcaaaaaaaaaaaaaaaagtatttaaatattatgtattatttggacacaataaaaaaattggaaaaaatattctttatctttgttgcttttttctctttttaccgctctcccccaatgttgctccctgtccagcgcctctccgcagcctctcctctgactctgccctgggttcaagctgcttctggtcattcgcgtgatggcctcgagggggcgctgcttccccactcatgctcagccaggactccttagtcagtttaattgggtttgttaacatcttccagcttagattcctcttctgcaaagtgggtattataatgttagccacgcagggatgacgaaggaagtgcagttgacccttgaacaacacgagtttgaactgtacggatgtactcaggcgtggatttttttccacccctgccacccctgagacagcaagaccaagccctccttctgttcttcctccttctccttctccttagcctgctcaaggtgaagacgacaaggatgaacacttttgtgatgatccacttccacttcatccatagtaaatatgttttctcttcctttgaagtttggacgggcacagtggctcactcctgtaatcccagcactttagaggccaagacgggtggatcacctgaggccaggagttcaagaccagcctagccaacatggcaaaaccctgcctctactaaaaatacaaaaattagccaggcgtggtggtgggcgcctgtaatcccagctactcagaggctgaggcaggagaatcgcttgaacccaggaggcagaggttgcagtgagttgaggtcatgccactgcactccagcctgggcaacagagtgagactccatctcaaataatgaaacaaacaaacaaaaaacaaaacaaaaacaaaacaccagaatttttttagtgacatttgcttttctctagcttacttattgcaagaatacagtatataatacatagaatgtagaaaatcagtgttcatcgaccatttatgtcatcaataaggcttttggtcaatagtaggtgttacatgcagtcaaaagttacatgcagatttttgactgtaggggtgagcttggcactcctaacccctgtgttggttctaaggttgactacacagaaatcccctagccctgggctcgtggttactcaatgcataaggataatcacgatttttttttttttttttaaaacagggtcttgctctgtcacccaggctggagtgcagtggtgcagtcatagctcactgcagcctcaacctcttgggctcaagtgatcctcccacctcagcctgcccagtagctgggactacaggcatgcaccaccaagtctggtgaatttttattttttgtagatatgggatctcactatattgtccaggctggtctcgaactcctgggctcaagcaatccacctgcctcagcctcccaaaatgctgggattacaggcgtcagccaacattcccagccactatttttttttttttttgagacagtcttgctctgtcccccaggctggagtgcagtggtgtgatctcagctcactgcaacttccgcctcctgggttcgagcaattctcctgcttctgcctcccaagtagctgggattacaggcatgcaccaccacgcctggctaatttttttttttttttgtatttttagtagagatgggatttcaccatgttggccaggctggtctcaaactctgggcctcaagtgatcatcccgcctgggcctcccaaagtgctgggagtgtgcccggccccagccactattttttaagagtacaaaattgaagcatattctgatagggaatttaaaacactcactaaagtaggcagaatagtataatgaaccgcagcccaccctaaccaccatcaccccctactcaacctcgccaaccccgcccccatcccatttgccttcctgtcaggtattattttgaagcaaatctcagctatcttatcattccataaatattttgttatatgtctctaaaacatacacactcttttttttttttttttgagacagggtctcactctgttgcccaagctggagcacagtggcgtgatcacgactcattgcagcctcaacttcccaggttcaagtgatccttccacctcagagtagcagggaccactggcacatgcaccatgtctagttaattttttaattttttgtaaaaatggagtctcaatatgttggccagtctggtcttgaactcctgagcttaagtgatcctcctgccttggcctcccaaactgctgggataacaggcatgaggcactgcacctggcccagactctttaaaagcctaaccagtctgggcatggtggctcatgcctgtaatcccagcactttgggaggccgaggcgggtgcatcacctgaggtcaggagttccagaccagcctggacaacatggtgaaaccccgtctctactaaaaatacaaaatattagccaggtgtggtggcaggtgcctctaatcccagctactcgggagggtgagacaggagaattgcttgaacgtgggaggcggaggttgcagtaagccaagatcatgccattgcactccagcctggatgacaagagcaaaactgtctcgaaaacaaaaacaaaaataaaaacaaaaacctcaccgcaataccattgtcacactgcaaaaactttgccaataattttttaatatctgtagattccagtttagccaataactgtggagttttggaatcatatccgaatttggctgttagctcacttccttgccaaggaaacttgggaaattgtttaacttctttgaagcctattttctttcttcttctttttttttttaaacgcagtctcactttgtcacccaggctggagtgcaatggcgtgatctcggctcactgcaacctccgccttccgggttcatgcgattctcctgcctcagcctctcgagtagctgggattacaggtgctcaccaccacgcccagctaatttttgtatttttagtagagacagggtttcatcacgttggtctggaagcctgttttcatcatcaatgaactgggatagtaaattgaagcccccagattgcttggagtattggagacagtatgtttcctaaaatttcagcccctaaaacttcttttcttttctttttctttttttgttttaaagagacagggttttgctctgttgcccaggctagagtgcagtgaggcaatcatatctcactgcagccttgactttctgggctcaagtaatcctcccacctcaacctcccgagtagttgggactacaggcacacaccaccacgcccagctaattttttgttattgttgttgttgtagagatgagggtctcactatgttgcccaggctggtcttgaactcctggccttgagtgatcctcccaccttggcttccccagtagctgggactacaggagcatgccactgtgcctggcagcacctgaaacttcttttttttttttttttgtgagatggagtgtagtgtggctctgtcgtccaggctggagtgcaatggcgtaatctctgctcactgcaacctctgcctcccaggtttaagtgatcctcctgcctcagcctcccaagtagctgggattacaggcacctgccaccatgcctggctaatttttgtttttagtagagatggggtctcaccatattggccaagctggtctcaaattcctgacctcaggtgatttgcccacctcggcctcccaaagtgctgggattacaggcatgagccaccgcgcctgaccaagtatctgaaacttctatccctgaaaatatagtaacactattattattactttttctttgagatggaggcttgctctgtcgcccaggctggagtgcagtggcgcaatctcggctcactgcaagctccacctcccaggttcatgccattctcctgcctcagcttcctgagtagctgggactacaggtgcaaaccaccacgcccagctaattttttgttttttgttttttgttttttatgtagagacagggtttcaccatgttagccaggatggtcttgatctcctgacctcgtgatctgcctgccttggcctcccaaagtgctgggattactggcgtgagccaccatgcctgggtgacttgtgagtttttgagacaaagtctcgctctgtcacccaggctggagtgcagtggtgcgatctcggctcactgcaagctccacctcccgggttcatgccattctcctgcctcagcttcctgagtagctgggactacaggtgcaaaccaccacgcccagctaattttttgttttgttttgttttgttttttttgtagagacggggtttcaccgtgttagccaggatggtcttgatctcctgacctcgtgatctgcctgccttggcctcccaaagtgctgggattactagcgtgagccaccatgcccgggtgatttgtgagtttttgagacaaagtcttgctctgtcgcccaggctgcagtgcagtggcaggatctcggctcattgcaacctccaactcccaggttcaaacaattcttgtgcctcagcctcccaagtagctgggattacaggcatgcgtcaccacgcccagctaatttttctatttttagtagagataggggtctcaccatattggccagtctggtcttgaatgcctgacctcaggtgatccgcctgcctcggcctcccaaagtgctgggattacaggcatgagccaccgtgcccggtcttggagttttaatggtaattaatcatggctaacatctcacgggcccttcctgtgatgtaggtgtagtgttagtctcactctctatataaatgcttttcattgtctcaccaacacaggaagttagtgagaaaattcaagtgcagagtagtgaagcgtcacaggcaagggacttcacctttctgcatcttgttttcttcatctgtgaaacaggatcataatgtctgtctcttggggtaataatgtggactgctaatgccaaatgccaaccaactgcacctcctagactgtcagcaaatggcatcttttacgaggagccgtatcagcctggcacacaatagttaaccactaagtctgggctgaatgcccggctaagctggtgccctagtgcaaacaatcgctttcattatcccagttgctgggagaattgggcaaggagagacccataaaatacctaagacgaaagttactaggatagccaggggcttgtcttccgggtggcgccgaggccaggaaactgtcctctctaacctatttccccagaggagtctaaattggtcgttcaactaccagcaaaggctaaagagaggctggagcccccaggacagccagaacgctgacactgcaaagggcctctgtccttactggggaagcccagtcctgctcagctgtcttcttcagcaacaaacagaagtccagaaagagaaacagttgtggaggaagctgttgtgatgataatttactgagcacctactatgtgccaggcacgccagccttaccagacaagatccttgggctcatggaattcactttctcgtgggacagacaaacaataacatgtagaaacatatcagctgttggtgagtaccatgcagaaaattaaaataaggcgatggcattgggagtgacttaaggggtcactacgcaatgggatggtcagagacagcctctcaggaggaggtagcattgaagctaaaatgtgaacaacatgaacagatgcagcatagagcactaaagtacaggacgtgcaaaggccctgaggttgaaataagctaaatgcattagactagggggttctcgagtaaggggaattctgccccctaggggacattgcaatgtctagggagacttttttttttttgagacggagtctcgctctgtcactaggctggagtgcagtggcgtgatctcagttactgcaagctctgcctcccaggttcacaccattctcctgcctcagcctcctgagtagctgggactacaggtgtccgccacatgcccggctaattttttgtatttttagtagagacggggtttcaccgtgttagccaggatggtctcgatctcctgacctcatgatctgccctcctcggcttcccaaagtgctgggattacaggcgtgagccaccgcacctggccgagactttttctttttgagatggagccttgctctgttgcccaggctggagcgcagtggcacgatctcggctcactgcaacctctgcttcccgggttcaagcgattctcctgcctcaggcttccgagtagctgggattacaggtacatgccaccgcgccagctaatttttgtatttttagtagagatggggtttcgccatgttggccaggctggtctcgaactcctggcctcaagtaatctgcctgttttggcctctcaaagtgctgggattagaggtgtgagccactgcacccagcctagggatactttttaattgtgacgactttggtggtggtggtgggggtgtgctgttgaaatctagtgggtgggggccggaaatgctttgcaacatcctaaaatgcatgggacaattgccaccacagaggatgatctggcctcaaatgtttgtcatactgagatggaggaagtctgggagagagactaggaaaaagcctagaggtgaaaggcaaggtcaaagactcttatcctcctgcgatcatcagcaggcagtaaccaagggagcgtggccaggcgctgaagtgaattcgggtccaaggagcctgctgggacccaggaaaacgagagaaggaacagaaattgtggtggaggcaaattcaagatcagaagattggggaggaggtgctaagagaggtctggagagatgctgggacccagaactggggcctcagtgagatcagcaggctgcagctaaactgtggtatccaggtgagttgtgggaaggtggctggggggccgggctgggtttatgggggcggggtccgtggaggagagggggtctgacccgcactcgctccctgactctgcccttctagctggtgagaaagttctcactctaagctgcagttttctcatctgttgaatggtgacgctcaactctatttactgggcctttactgctgagaaaataattaactctggctgcccgtggtggctcatgcctctaatcccagcactttgggaggctgaggcaggaggatggcttgaggccaagagttcaagaacagcctgagcaacacagtgagactcccgtccctacaaaaaataaaaaacttaagcctagcatggtggcacatgcctatagttccagctacttgagacgccgaggcaggaggatggtttgagtccaggagttcaaggctgcagtgagctatgatcatgtcactgcactctaatctgggcaatggagtgagaccctgtctcttgaaaaaaacaacaacaacaacaacaactaaaaaactagctaggcatggtggtgtgtgcctgttaatcccagctactcaggaggctgaggtgggaggatcacttgaggacaggagatggaggctgcagtgagccacaatagtgccactgcactccagcctgggcgacagagcaagacttgactttttttttttttgagacggtcttgctctgtcacccaggatggagtgcaatggtgcgatctcagctcactgcaatgtccgtttcctgggttcaaacaattctcctgcctcagcctccctgagtagctgggattacaggcatgaaccatcacgcccagctaattttgtatttttagtagaggcggggtttctccatgttggccaggctggtctcaaactcctgacctcaggcgatccgcccaccttggcctcccaaagtgctgggattacagatgtgagccactgtgcctggccgaccctcactcttaaaaaagaattaactcagcaggcctgagttgtccataccccacacattaaagctgtagctcttgacctgctcctgggaagtgacctctaagcccttggaatgggataagggtgtctttgtttacctggagagccttggctcacactagatactaacaacatgacttagagagggagctttaagtcacgtgatattggttgacctctggaggggctggggattaaggtcagctatgctggtggtcaatcatgtctacgtgaccaactcccaataaaaaccccggacaccaaggctcaggagagctttcctagttggtggcaaactgttcatgttgtcacacatcactgctgggagatttaagtgctggccatacaacttcactgggaggggacgactgaaatctcacacctggtctcttctggaccctgccttggatgcctcttcctgtgcctgatcttattttattttttgaggcagagtctctctctgttgcccagtggtggctcactgcagcctcaacctcctgcgctcaagtgattctcccatctcagcctcccaagtagctaggaccgcagacacgaatcaccatgtccagctgatttttttgctgttgttgagatagggtctcgctctgttgtccaggctggggtacagtgttgcgatcttggctcactgcaacttctgcctcccaggctcaagtggtcctctcacctcagccttgtgaatagctgggactacaggtgtgcaccaccacatctggctaatttttaaattttttgtagaaatggggtttcaccatgttgcccaggctggtcttgaacccttggactcccaaagtgctgggattacaggcgtgagccaccaagtctggccctggataatttttttattttgtagagacactgtctccctgtgttgcccaggctggtcttgaactcctgggctcaagcaatccccacctcagcctctcaaagtgccgagattacaggcatgagccactgtgcctggccccttggctgattttaatttatatccattcatcataacctatgagtacctattttacagctttttctgttttgttttgttttgttttgttttgttttgttttgttttgagatggactgtccctctgttgccaaggctgggtgtggtgtgatctcagctcactgcaacctctacctccttggttcaagcgattctcgtgtctgagccccccacgtagctgggattacagacgtgcaccgtcatgcccggctaatttttgtatttttagtagagacggggtttcaccatgttggccgcgctggtctccgactcctaacctcaagtgatcggcccgccttggcctcccaaagtcctgggattacaggcgtgagccatctcgcctgggctatgacaccatttttaaattctctgagtcctaaggaatcatggagcttgagggtgctcttggggaatccctcaatggcagagtctgtcctgggtggacaaggcagggaagggaagtcaaggcagagaggatagtaagagcaaagacacaaaggtttgaaaatacagttgacccagtagaatcaatatcactgttttgttgagagctcactaatgctgggcattttatagacctatctcccaaccgccttgttgatgttttgttcaaggtggatattttcggcattaattttgatctgctaacacattgcactacctcatatattgctgcagagacaagcgccctgaatggctcttactttcatttcacagaccatgcggccgatgccctgggagggagaccacttgcttaagtcctccaggagggcgatggaggagccggcattccaaccaggctcacggatgccaaggtatacgcgtgttctctctgcctccagcggtggtttgctactgttgtgaagaggttgggcaggattcaggtcgccagggcattttcaataatgtcagatcatggctggacgtggggcctcacacctgtaatatcagcactttgggaggctcaggtgggaggatcgtttgttggcaggagcctgccaagttccagccttgaactcaacccagtgagaccccatttctacaaaaaaaatatttttttttgagacgaagtttcgctcctattgcccaggctggagtgtaatggcgccatcttggctcatgcaacctctgcctcccaggttcgagtaattctcctgcctcagcctcccaagtagctgggactacaggcatgtgacaccatacccagctaattttttgtatttttagtagagatggggtttcaccatgttggccaggctggtctggaactcctgacctcaggtggtccacccacctcgacctcccaaagtgctgggattacaggcgtgagccactatgcctagccaaaaatttttatttattttttatttttttattttttgagacggggtctcactctgtcgcccaggctggagtgcagtggtatgatcttggctcactgcaacctctctgcctcccaggttcacgcaattcccatgcctcagcctctcgaatagctgggactacaggcgtgcaccaccatggccagctaatttttgtatttttagtagaagcaaggttggccaggctgatcctagactcctaggctcaaatgattcgcctgtcttggactcccaaagtgctgggattataggcatgatccactgggcccagactctacacaaatttttttttttttaattaaccagacgtgatggtgcacacctgtagtcccagctacttgggaggctgagatgggaggatcacttgagcccaggagatcgaggctacagtgagctatgatcacaccactgcactccagcctgggtggcagagcaagactctgtatcacctaacaacaaacctcctgcaggcaaagataactagctagagtttatttatttatttaattttattgttcatttatttatttatttatttttgagatggagtctccctctgtcactcaggctggaatgcagtggcatgattttggctcacttcaacctccgcctcccaggttcaagcgatgcttccgcctcagcctcccaagtagctgggactacaggggctcaggaccatgcctggcttatttctgtatttttagtagagatggggtttcaccatgttggccaggctggtcttgaactcatgacctcaagtgatccatctaccttggcctcccaaagcggtgggattacaggcacgtgattgtagctcacagcagccttgaactcttgggctcatgcaatcctcccatctcagcctcccaagtagctgggacaacaggcaggcaccatcatgccatagctacattgttttttttttgtttgtttttttttgctttttttttagacagagtttcattcttgttgcccaggctggagtgcagtggcacgatcttggctcactgcaacctctgcctcccaggttcaagtgattctcctgcctcagcctccggagtagctaggattacaggcatgcaccaccaaacccggctaattttgtatttttagaagagacagggtttctccacattggtcaggctggtctcgaactcttgacctcaggtgatctgcccacctcggcctcccaaagtgctgggattacaggcgtgagccacagctcctggcccatggctctatttttaaaaaacttttttttgcagagatgagggctcactgtgttgccctggctggccttgaactgctggctcaagagatcctcctgccctggcctctggaatagctgggattactggaacaagccattgtgctcagctactagaattgattttaaactgttttctttctttttttcttttttcttttgagatggtgtcttgctgtgtcaccaggctggagtgcagtggtgtgatcttagttcactgcaacctccacctcctgagttcaagcgattctcctgcctcagcctcccaagtagctgggattacaggcctgcgccaccacacctggctaatttttgtatttttcatagagacagggtttcaccatgttggccaggctggtttgaactcctaacctcaagtgatccacccacctcggcctcccaaagtgctgggattataggtgtgagccactgcacctggcctaaaactggtttctcagtttttcaacactgctgacaactgggaacagatcattctttgtgggggcttcctgggcattgttagatgttgagcagcatccctggtctccacccacgtgatgccagtagcatcctccagtcgtggcaactggaaaggtctccagacattgcaagtgtcccctgggggctgaatggtccccaagtgagaactgctggttgaaatagtatgtgcggtgcctggacgtggaaggactttgcctcgtgggagggggtgggaagggcagaatggggtgggactttcgtcaagcggttgtctttcttgtctgggctgtggggctgggcatggctcccagcctctcctctgcacacctgggctcaggctcaacttacacgggtaggccccaggggacccaggtgttcaagaggttggctggtccccgggccccaatgcccagcactgggaaaccatagttgctatggtgactactgcgctctgaggacgaggagctgggaagaggactcccgtgcctagaggagccaacatccagaggtcttggcggggaggccactgtctaatatccctccatgagtgcttgcagaccaaggaaagcagtggagaggagctggttcagctccccagaggcactggaggtggtgggggctgcaggtcactgggggagcctcggaaggtgaaactggctccccgttcctgatggccctgcccggctggcctaccaggaaggctgcctggctgctggcgtgaggtctctgagccccacgccctttccaggggaagggtcatcttggtgggtgggcggcaatgagcgtgggccctctcagcccgagtacccgccggcggcttctgcggggtgaagccggccccctcccagcacctccacccagcggtgtgaccatcttcatcagttccacagtctcaggtaaggtgcagggtatggatgggggctcagaggcaggttggcacgctcaggcggtgtcagggcaatgggcacagctcatggagtcctttaagagacctagacgtgaaccaagtactgtgtttcacgcctgtaatcccagcactttgggaggctgaggcgggtggatcacttgaggtcaagagttgaagaccaacctgggcaacatggcgaaaccctgtctctactaaaaatacaaaaaattagctgggcgtagtggtgggtgcctgtaatcccagctacttgagaggctgaggcaggagaatccctgaacctgggaggcagaggttgcagtgagccaagatcgcgccatagcactccagcctgagcaacagagcaagactctgtctcaagaaacaaaataaaccaaaaactcaaaaaggagatattagataatagcatgcagctacacagcactgcctaactccacattcagtgaagtcagttggcaacttgatattaaccagggtggagcatttaaaccacggaaattggcagaaaatacaaatcggatttaaaaaaatttgttttggagaacagagtattatggaacatttgctgggtcactgctctttttttttttttttttttctgagatggagtctcactctgtcgcccaggctggagtgcagtggtgcgatctggactcactattacctctgtctcccaggttcaagggattctcctgcctcagcctcctgagcagctgagattacagccacctgccaccatgtctgactaatttttgtatttttagtagagatggggtttcaccatgctgaccaggctggtgtcaaactcctgacctcaggtcatctgccccactcagcctcccaaagtgctgggattacaggcgtgagccaccatgcctggccacaccactccatgtatatgtgctctcatagaaattacatcctggttcggggaatggacacataaattaagtaattgcaggccgggtgcagtggctcacacctgtaatcccagcactttgggaggccgaggcgggcgaatcacgaggtcaggagattgagaccatcctggctaacacagtgaaaccctgtctctactaaaaatacaaaaaattagctaggcgtggtggcgggcgcctgtagccccagctgctcgggaggctgaggcaagagaatggcgtgaacccaggaggcggagcttgcagcgagccgagatcatgccactgcactccagcctgggcaacagagcatgactccatctcaaaaaaaaaaaaaaaaaaaaataagtaattgcagcttgtgggccaggtgtggtggttcacacctgcaatcccagcacattgggaggccgaggtgggagaattgggaaacctctatgatgtgaatgcagctcaggtagtgactcatgtgggagcctcctggaccctctgtttcctcctcgagaagccagactgagaacccaacttgatagagttgctgtgagtggcatacgatgttacaactaatatttatgaccaatgtactgtgtgtcaggcttaaaaactgccagaaccttgccacagctgcatggccctgtgtgaccggaccctgctcacctccccaaccttatctcatgtggtcactcccttgtctacctgtcatatccacaccagaatccatagatccgggaacccacaaggccctggggcccatatcaggactatcactctcacggttccctcttctccttcttattctgatcctttgggtctcagtgcaaacaccccgtcttcagggagcccttctctgcccctcgatgtaaagtagatttgtccctctgaagtgggcagattgcttgagctcaggagttcaagaccagcctgagcaacatggcgaggccccatctttacaaaaagtaaaaaaaaaaaaaaaataggctgggtgcagtggctcacacctgtaatcccggtactttagggggccgaggcacctgaggtgaggagtttgagaccagcgtggccaacatggtgaaaccccgtctctactaaaaatacaaaaattagcccagtgtggtggtgtgcgcctgtaatcccagctactcaggaggctgaggcaggagaatcccttgaatctggtaggcggaggttgcagtgagccgagattgtgccactgcattcaagcctgggcacagagcgagactctgtctcaaaaaataaaaaaagagaaaagaaaagaaagagagagagaaggaaggaaggaaggaaggaaggaaagaaggaaaagaaagaaagatttgtccctgttattctctagcccagcccacccgtgtgttttcaatagcactcttcacaaactgcaagtactttttaaaactatttatgggccgggcgcagtggctcacgcctgtgatcccagcactttgggaggccgaggtgggcagatcacaaggtcaggagattgaaaccatcctggccaacatgatgaaaccccatctctactaaaacacaaaaaattagccaggtgtggtggtgcacgcctgtaatcccagctacttgggaggctgaggcaggggaattgcttgaacccaggaggcagaggttgcagtgagctgagatcacgccactgcactccagcctggtgacagagtaagacttcgtctcaaaaaacaaactaacaaaaaaacaaaaaaaaaacccaaaatctatttatgtatttatttattgtgccccttggttaagcataaggggtacaatggcaaacaagatataatccactggtcacagtggctcactcctgtaatcccagtgctttgagaggccaaagcaattggattgcttgagcctaggagtctgaggccagcctagaaaacatagtgagactccttctctacaaaaaatttaaaaaaatatatatggctgtggtggtgcccctctataatcccagctactcaggaggctgaggtgggaggattgactgatgctaggagtttgaggttacagtgagctatgattgcaccactgccctccagcctgggtgatggagtgagacctgtcccttaaaaaacatttttttaaaaatatatacagggctgggtatggtggctcatgtctgtaatcccaacactttgggaggctgaggtgggaagatggcttgagtccaggagttcaagaccagcctaggaaacataaggagactccacaaaataaataaaataactgcctattgcgattttttttatttttctttctttctttttttttttttttttgagatggtggcagcagatgaggctttagccgcaggccaggcgcagtggctcacgcctgtaatcccaacactttgggaggcagaggagagagaatctcttgaggccaggaactcgagaccagcctgggcaacatagcgagatcccattctccacaaaaaaggggaaaaaagacaaaagtaaatcaataaaataaaagcagagctatgaggctgggaagagttctgagtcctttccactaataccctccatgcccttccttgcagatatggatgcagagagggaagccctgcagagcactgcctaccctgaagtgccagaccttctgccagaggcacggcttgatgtttgaggtaactggaagtcactccgggctccatgctttttttatttttttttgacacgtagttcttgctctgtcgccaggctggagtgcagtggtgcgatctcggctcactgcaacctctgcctcccgggttcaagcgattctcctgcctcagcctcctgagtagctgggactacaggcgtgcgccaccacgcccagctaatttttgtatttttagtagagacggggtttcaccatgttggccaggatggtcttgatctcttgaccttgtgatctgcccgcctcggcctcccaaaatgctgggattacaggcgtgagccactgagcccagccccatgcttttttttttttgagacagagtctcgctctgccacccaggctggagtgcaatggtgcaatctcagctcactgcaaccttggcctccagggttcaagcgattctctcgcctcagcctcctgagtagctgggattacaggtgcccgccaccacgcccctctatccatactcttttaatgctttactgttgagttttaaaattcacagtgatttttaaacaaaggtcccacatgttctttttgcaccgagccccgtagattctgtagttggtcctggagatctggccctggagataaaaatccttgggactataaaaaggcaggtgggactgggcgcggtggctgacacctgtaatcccagcactttgggaggcaaaggcgggcagatcgcttgaggtcagaaactcgagactagcctaggcaacatgatgaaactctgtctctactaaaaatataaaaattagccgggcgtggtggctcatgcctgtagtcccagctactcaggaggctgaggcaggagaatcgccagaacttgggaagcagagattgcagtgagctgagatcaagccactgtactccagcctgggtgacagagtgagactccgtctcaaaaaaaaaaaaaaaaaaggcagatggaggggttacagccatgtgcaccgtgcttggttagcatggcaggtggtgtagaaaagtgagtaggagtgaatgcttttgaacacagattcatcgctgtgtcccttgcagtgtgaccttggacatgtcatttaactgtctgttgttgttgctgctgtttttgtcttgccttcagagcttcctggccctcttcgtactgggcttcaggaggagtataagagggctttgcgatatgggggatgggcatggaggttggacatgcctttttctagaacgctgatggtgtacctgtttggcacagtcccaaaacagtaggagcccctaatgctgtctccttgtaccaatccctggctagggaatttttttttttttttcagatgaggtccagtggatgacagagcaagacttcatctcaaaaaaaaaaaaaaagaaaaagtgaaaaagtgcagtggtgtgatctcacagctcactgcaaccttgagcttctgggctcaagggatcctcctgtctcagccttctgaggagctgaaactacagacatgcagcgctatccctggctaaccggggatgtttctgcctgcacatttccctgtggaaactgatgaacatctttggagtctcagcttaacttgagggctgcctccttgctgcttatgagaatgattcattgcaccaaagtcccatttggttaaaagatgaggccgggcacagtggctaacacctgtattcccagtgctttgggaggccaaggcaggaggattgctggaggccaggagtttgataccggtctgggtaatataacaagatcccgtctctataaaattaaaaaaatgagctgggtgtggtgacgcccacctgtagtcccagctactggggaggctgaggtgggaggatcacttgaacccaggagtttgaggctgcagtgagctgtgatggagccactgcactctagcctgggtgccagattgggatgctgtctttaaaaaaaaaaaaatctgggccgggcgaagtggctcatgcctgtaatcccagcactttgggaggccaaggcgggtagatcacctgaggccaggagttcgagaccagcctggccaacatggtgaaaccccctctctactaaaaatacaaaaattacccagatgtggtgacacgcacctgtaatcccagctactcgggaggctggggcaggagaattgcttgaacctgggaggtggtggttgcagtgagccgagataacgccactgcactccagcctaggcaacagaatgagattctgtctcaaaaaaaaaaaaaaaatcaagtggctctttgggtaaaaaagaaaagaaaaggaaaaagatgcatgatcgttatggtttgtatatttattactaagaaagaagcagtgctggaaattccactctgcccaccattgatcatgagacatagttcaatgtcaaaggcactatggaagcatcagcactgagagctgatgaaatggtcaagcttttctgtttaatgcccatgcccgtcctctgacgcggatgctgtcaacatcctccacacgcacatcgggagacggcggtccctccagaagcacaagctccttccagaggctggctcctgaccccttttcctttcctgctcctctaactcattgttcctccccctttcttcctccagtcacattgagtactgctggcctctcaccacttgtcttaagaatctatgtgtctttctctcggtgctaaagaattcagggaggcagggactgttccgagttgtctttgtctccctgtcaccccagccttccacagggtcagctttgcctacctgaactgagctgttctgcccagcctccccatggcgagcaggcacaaatgaactgcaagcgtgcggttgccaaggagaccttggtacgtccagtgctggccaaactaaacaccctcctttgcaaggaaagctttgtgaacaagtgtggacacgtccttgctttcaaagcaacagtttgaaaatggccaagttccttttttaaaaaagcttttctgtcagggcgaggtggctcatgcctgtaatcccagcactctgggaggccgagacaggcagatcacgaggtcaggagattgagaccatcctggctaacacggtgaaaccccatctctactaaaaaatgcaaaaaattagccgggcatgtagtcccagctactccggaggctgaggcaggagaatggcgtgaacccgggaggcggagcttgcagtgagccaagattgcgccactgcactccagcctgggtgatagagcaagactccatctcaaaaaaaaaaaaaagattttctttctttttttttttcttttttctttttctgtttttcttgcaacagggtgtcgctctgtcacccaggctggagtgcaggcatgcaatcacagctcactgcagctttctgggctcaggtgatcctcctgtctcagcctctcaagtatctgagactacaggcacacaccactacacctggctatttatttatttatttatttatttatttattgtagacacaatgtctccctatattgttcaggctggtctcaaactcccggcctcaagagatcctcctccctcagcctcccatagtgctgggattataggggtaagccactttgccctgcctctgttctaatttttttattttaattaacttgcttttttatttcttaatttttatttttttagagatgaggtcttgctacattgcccaacctggtcttgaactcctgggttcaagcaatcctcatgcttcagcctccagagtagctgggattataggcacatgccaccgtgcccgactaaatgtttataaataaacttctgaatttggaatttaggcttacaggaaacgcatggacagtacggagttcccatacaccccacactctgtgtctcctaacgttttacctaaccacagcacaaccaactatgttgttacaactatgaaatgaactttgaggacaggtgcagtagctcgtgcctgtaatcctaacattttgggaggctgaggcagacagttcacttgagatcaggagtttgagaccagcctggccaacatagcaaaactttatctctaataaagatacaaaaaaattagccaggcgtggtggtgcacgcctgtaatcccagctactcgggaggctgaggcaggagaattgcttgaactcgggaggcggaggttgtggtgagctgagagtgcaccactaagctccagcctgggtgacagagcaagactctgtccccctgaccaaaaaaaaaaagaaagaaagaaagaaagaaatcagtctgggggcagtggctcatgcctgtaatcccagcattttgggaagccgaggtgggtggatcacctgaggtcaagagttcgagaccagcctggccaatatggtgaaaccttatctctactaaaaatacaaaaaattagccaggcatggtggtgtgcgcctgtagttccagctactcaggagactgaggcataagaatcgcttgaacccattaggcaaaatttacaatgagccaagatcatgccactggaaggaaggaaggaaggaaggaaggaaggaaggaaagaaggaaggaaggaaggaaggaaggaaggaaggaaggaggaaggaaggaaggaaggaaggaaggaaggattttccagtgagacaagattgcgccactgcactctagcctgggtgacatagcaggactccaactcaaaaaaaaaaaaaaagataaatcaacattggtacatgactgttaacctcctgactttattcaaatgttgccagctcttctatctaagtcttttctggtgaagaaccccatccagggtaccccattgcatttcgttgtcttattgccctagtctcctctggtctgtgtcaatttctcagtcaccttatttctcatgaccttggcagtctttttctttccttctttccttctttccttccttccttctttccttccttccttcctaccttcctctctctctttcttttgacagagcctggctctgctgtccaggctggcatgcagtagtacaataagagctcactgcaacctctgccttgtgggctcaattgatcctcctacctcagcctcccgagtagctgggactacaggtgcccaccaccatgcttggctttgactggcagggcatcttgaagaacgcccttccctctagtctgggtctgtctgttatttttctcatgattatactgaggttatgaatttggttcaagttcttttaatccagacatccccctacaggaagaggctgtcaaaaatttttgaaagaaactttctgctttgtcaaaagggattgaaaaaacaaatcacctgtcatgccacctctctgacaaacttgtgtttctatttcccaggtcgttgatctgaggtggggtattcggaacattgaagccactgaccacttgaccacagaactctgcttggaggaggttgaccggtgttggaaaacatccatagggccagcttttgttgtgagtgtcttgggaggaatgggttagctcttactcctccaggatatgccccctgctttctagacaaactgatcagcagagggaagtaggtaccgtttctgctttcgtaccttatccctatggcctgcctgtggcagacattactaatcaatcacagaactctttctgcagagctgaatgggatccagacattagcagtcaaatggaagcagcaggtggcttggagagtagaatgttgaagccagaaggaatcttggaatttgatctggactttctcccaccttccccaccccctccactttatgtctatagaactttgggatcctggaaagccatggaaaaggtggaaacccacagggtcttgggatattttttttcctccatgtgcccactggtttcaggtcgtggggacttctcccctctctcttccaattgcaccccttctatcaaaaaatcaatctccagtccacaattaatggttttggctattaaaattgaatgatattcctgagtcttttttctttttcttttttgagacagagtctcaaaaaagcccaggctagagtgcagtggcaagatcatggctcactacagccttgaactcctgggcttctgatctccctgccttgttctcccaagtagctgggactacaggtgtgtgccgccacagttggctagtatttttttggaaatatggggtctcactatgttgcccaggctggtcttgaactcctaggcacaagtgatcctcccaccttggcctcccaaagttctgggattacaggcataagccaatgcacctggtctagttttaagtttttttttttttttgagatgggtcttgctatgttgcccaggctggcctgagtcctaatttattacatcgagttccagatacatccaagaacgatcacattttccttagaaattctagagcagggggccgggcgtggtggctcacacctgtaatcccagcactttgggaggccaaggtgggtggatcatgaagtcaggagattgagaccagcctgggcaacatagtgaagtcccatatctactaaaaaattagctgggcatggtggcacgtgcctgtaatcccagctacttgggaggctgaggcaggagaattgcttgaacctgggaggcagaggttgcagtgagccgagatcatgccactgtactccagcctgggcgacagagcaagactctatctcgaaaagaaaagaaaagaaaagaaaagaaaagaaaagaaaagaaaagaaattctagagcagaggccaacaagctatagcctgaaaggcaagtgtggcctgctgcctgtctttgtaagtaaagctttattggcacacagccatgtccacttgtttacacattgtttagccctgctttcaagctataatggcagagtttagtcgttctgacagagaccatctggcctgtaaagccaaaagtattgactgtctgactttttccaggagaaatgtgctgatccctgtcctggacagtaaagagggaaaaagtaaagaaaagtaccatggccaggtatggtggctcactcctgtaatctctgcattttgggaggctgaggcaggtggacaatttgaggtcaggagtttgagagcagcctgggcaacatggtgaaaccccatctctactaaaaatacacaaattagccagacgtggtggcacatgcctgtgatcccagctacttgggaagctgaggcaggataatcatttgaaactgggaggcagaggttggagtgagccgagattgtgccactgcattccagactgcgcaacagacggagactctgtcaaaaaaaaaaaaaaaaaaggagaaggtgagggccagagagatattctattttctgagatctattttctgagacctaaagtgtcccaacattataacgaaagactgtaacaagggctttgggaattatgagccaggaataatgggcaaaacatatatatataatctatatataatatatatattatatatatataatataatgatatataatatataatatataataacatataacatactattatatgtataatatataatgtatacattatatattatatataatacattatctataatatataatacattatatattatatatatatatatttcactcctttttctttgagacaaggtcttgctatgttgcccaggctggttttgaactcccggactgaagcaatcctccagccttagcctcctgggtagctgggattacagttattcttttgatctacacttctattgtaatttggtgccactctgttttatttattactgctttaaaatatatcctaatgtttggaaaactctacattctgttgtaaatctcctaaatttccagtctcctaagtttaatttttcaaaggagcccaatgatcattttaatgagtttccaagaaaaaaaaaaaggagagagaggctgaccatggtggctcatgcctgtaatcccgcacttcaggaggctgagatgagaggatcacttgagcccaggagttcaagaccagcttgagtaacatagtgagaccctatctctaccaaaaaaaaaaaaaaaaaaaaaaaaaattatttttttaaggaagaaagggaaaagaagggagacaaagaactccaggaggaatctgattttgcaacccaaattgcaggcagccaaaagcacagtgcagctttctgattgcacagagaacctaggggtgatctctgagcttctctggggcctgaccaaccggccctgggaccttccagaaaggccctatggccagctgagctggacttccttcctgcttccatcttgaaccaggcatcacccctctactgcccaagagccacagcatcattctgctccatgactctgatttgtgggggcgccttccacaaaaatcagagatgtgctggaggcccttggagaggtgtctctctggtaaataagtcattaggcagcaccgaggccggggacagctccccatggcacttccttttagagaggctcctgtctcttgggctatcagcagccccagtgtctccagagctctgagagttgttcctggtgggaactgttcctatttcccttgctctgatcccacagattggagcagtttgttttgttttgttttttaccacctgtttccttcatataacctctggtctgtggttggcttgtgtcttagtctattttctgttgcttataacagaatccctgaaactgactagttataaagagatgaggctggccaccttggatcacacttgtaatcccagcgctttgagaggctaaagccggaggatcgtgtgatcccaggagttcaagaccagcctgggcaacgtaacaaggccccatctctaaaaaaaaaaaaagaacagttagctggggtggtggctcatgcttgtagtcctagctgctccggaggctgagatgggaaaatcccttgagcccagaagtctgaggtggcagtgaactatgattgtaccgtggcactctggcctgggtgccagaggaagagtctgtctcttaagaaaaaaagaagaaaaaagaatagaaaagaaattattattattattattttgagatggagtctcactctgtcacccaggctggggtgcagtgggaacatgttggctcactgcaacctccatctcctgggttcaagcaattctcctgcctcagcctcctgagtagctgggattacaggtgcccactaccacacctggctaatttttttatatttttagtagagacagggtttcgccatgttggccaggctgctcttgaactcctgacctcaggtgatccacccacctcggcctccaaaagtgctgggattacaggcgtgagccactgcgcccagacttctattttttttttttttttttttttgagatggagttgctccgttacccaggctaactcctaagctcaagtgatctgcccaccctattctcccaaagtgctgggattacaggtgtgagccaccgcactggcccaggttaactcttttggattccggtttgcacctactccaagtgtggttctggcattaagaccaaaattttatggcctcccatgccctacagaatcttgtgcaggggggccgggtgcagtggcttacgcctgtaatccaagcactttgagaggccgaggcaggcggatcacttgaggtcaggaattcaagaccagcctggccaacatggcgaaaccctgtctctactaaaaatacaaaaaattagccagctgtggtcgtgggtgcctataatcccagctacttgggaggctgaggcaggagaatcacttgaatctgggaggcagaggttgcagtgagccaagattgcactattacactccagcctgggtaacaagagtgaaactctgactcaagaaaagaaaagggggaggggacagccttatcccccttcgctgtccctcttcttgccagtgccttagtcgctgtgcccttcctacagcagccatgcttcttcctgccacagggcctttgcacatgctgctccccctgcctgcaagatactctgcctaataaactccttttcatgtttttggtttttttgttttgttttgtttttgtgtttttttttttttttttgagacagtcttactctgtcgcccaggctggagtgcagtggcaccatgtcggttcactgaaacctccctctcctgggttcaagcaattctccttcctcagcctcccaagtagctgggattacaggcacctaccaccatgcccggctaattatttttatatttttaatagatatggggtttcgctatgttggccaggctggtctcgaactcctgacctcaggtgatccacctgcctcggcctcccaaagtgctgggattacaggcatgagctaccatgcctggctcttttcatgtcttattctgcagctcaggtgaatttccctgactccccaggctacgtacgacccatgttttaccctttcttcctagcactctaacagctgccatttgaccttggtctgattctagattgatgcctgcctctttggctaagactccaaggttggctgggcccggtggctcctgcctgtaatcccagaacgttgggaggctgaggtgggcagattatttgaggtcaggagtttgagaccagtctggccaacatggtgaaacccagtctctactaaaaatacaaaaattagccgggtgtggtggtgggcgcctgtagtcccagctactggggaggtagaggttgcagtgagctgagattgtaccactgcacgccagcctgggtgacagagtgaaactgtgtctcaaaaaaagtaaataggccaggcgcagtggctcatgcctgtaatcccaacactttgggaggctgaagcaggcggatcacctgagatcaagaattcgagaccagcctggccaacatggcgaaaccctgtctctactaaaaatataaaaattagccaggcgtggtggctcacgcctgtaatcccagctactcaggaggctgaggccggagaatcacttgaactcaggaggcagaggttgcagtgatctgagattgtgccactgcactccagcctgggcgacagagggagattccatctcaaaaaaataaaataaataataaataaataaatatctgtgggctgactgtactcagaatgtggcgctttcatactgagctctgatctctccctttctccgtggtcagcccttaagccatcctgtgaccttggactaactctgttccatccccaggcccctgtttccatgataataaaaggggagagctggacttagggtcctcttagccctgcttcacctctgattctccctggaaggaccagaactagaatggagaaccaccacaagatttaatttaaatcttaattatcgagataaattgtatatatattttgagacggagtttcgctcttgttgcccaggctggagtgcaatggcgcaatctcggctcaccacaacctccgcctccagggttcaagcgattctcttgcctcaggctcccgagcagctgggactacaggcatgtgccaccatgcctggctatttttaaaaaaattttttgtagagacagggtctcactatgttgcctattattattattattattattattattattattattattattttatttgagacagagtcttgctctgtcgcccaggctggagtgtagtggtgccatcttggctcactgcaaccttcgcctcccggcttcaagcaagtctcctgcctcagcctccctagtagctgggattacacctgcacgccaccatgcctggctaatttttgtatttttagtaggggtttcaccatgttggccagactggtctcgaactcctcttgacctcaaatgatctgcccacctcagccttccaaagtgttgagattacaggcgtgagccaccttgcctggccccattatttgtttctttagagacagggtctcactctgtcccccaggctggagtgcagtggtgcgatcacagctcactgcagcctcgaactcctgagctcaagcggtcctccagcctcagcctcctgagtacctgagactacagatgcacacccccacaccctgataatttttaatttttatagatatggggtctcactatgttgcccagctagtctctaactcctgggctcaagagatcctcctgccttggcctcccaaagtgttgggattacaggcgtgagccaccatgcctagcctaggggacaattctttattgaccctcgtgacttctggtggctccaggctataagggcggtcaacttcacctccatcttctcagagtgctggttggattgaagaattgaattgacataaaattgattaacaggaaaagaaaccatacatatttatttatttatttattagtttgtttatttatttatttattttgagacagagtcttactctgttgcccaggctggactgcggtggcaccatgtcggttcactgaaacctccctctcccgggttcaagcaattctcctgcctcagcctcccaagtagctgggattacaggcacctaccactacgcccagctaatttttatatttttagtagatatgggatttcactatgttggccaggccagtcttgaactcctgacctcaggtaatccacccgccttggcctcccaaagtgctgggattacaggtgtgagccaccgcgcctggccgatatacatttattaatacaagtgttttacatggcataagaaccctcataaggaaataaggacccacaaaagcagctagagtcatttacttatatattgaattggagaaagaatagtaaattgtggctggggacagtggctcacgacagtaatcccagcactttgtgaggctgagatgagaggatcccttgagtacaggagttcaataccagcccgggtaatgtagtgagaccctatctgtaccgaaaataaaaacttaaaaattagctgggtatggtggcatgtgattgtggtccaagtgggaggatcacttaaacccaggaggttgaggctgcagtgagccatggttgtaccaccgcactccagcctgggcgacagagcaagaccttgtctgaagaaaaaaagtgagatttgaatctgtgacttcctctctgccaggccctcatcggtgatcagtacggcccctgtctgattccctcgcggatcgatgagaaggagtgggaggtattgagggaccatctgactgccaggccaagtgacctggagctggtggcacgatacttccagagggacgagaatgcgtttcctcccacctacgtcctgcaggcaccaggtactggggaggcctgtgaaccagaggaggccaccttaacttctgtcctacgctctggagcccaggaggcccggaggctggggctcatcacccaggagcagtggcagcactaccaccggtcaggtgaggccgcagggactcccctctggagacccacaagaaactgaccacgtgttcagaatatccatcccctgttggcaaaaatgcaacagtctgcatttcttgcaaatgccaaaccagtcaacctctggtccctcggctctgagaaaggctgttttactgatccaagatagttcagccatgttcctgatcaatcttggtctcaggatcttcctctcctcgctggctctttcttcttgtctcccagggaggttcctggcacaggggccgtattagtctgttctcatgccactaataaaggcatacttgaggctgggtaatttacaaaggaaagaggtttaatggactcacaattccacatggctggggaggcctcacaatcatggctgaaggcaaaggagaagcaaagaggcacatcttacatggtggcaggtaagacagagtgagagccaagcgaaaggggaaattccttataaaaccatcagatcttgtgagacttattcactaccacgagaacagtatgggggaaactatcccccatgattcaattatctcccaccaggtccctcccacagcacgtgtgaattatgggagctacaattcaagatgagatttgggtgaagacacagccaaaccatatcagggggagcaatgcagggcgactaccatcccagtttgcctgggacggaggggttcctaggatgcaggatttgtattactaaaatctgacaggctgagcccagtagtgcctacctgtaatcccagaattttggaaggccgaggcaggagaatcacttgagttcaggagttcgagaccagcctgggcaatatagtgacacctcatctctacaaaaaaaaaaaaaaacttttaaaaatttgccaaatgtggtagtgcatgcctgtagtcccagccactcaggaggctgaggcaggaggattgcttgagcccaggaggcagaggctgtggtaagccaagatcatgccactgcactccagccggggttacagagagagacctgtctcaaaaaacaaaaacaaaaacaaaaacaaaattagctaggtatagtggtgcatgcctgtagccccagctactcaggaggctgagatgagaggatcgctggagcccgggagttggaggctgcattgagctatgatcttgccactgcactccagcatgggtgacagagtgagaccctgtctctaaataaataaattaattaattaaataaaatacagtctacccttgaacaacatagtgtttagggactctaactccttgcacagtcgaaaatctgtgtataacttttgactcccccaaaacgtaactactaatagcccaccaatcacataaattgttgaccaggtgtggtggctcatgcctgtaatcccagcactttgggagtctgaggtgggtggattacttgagccccgagttggagaccagtctgggcaacatggcaaaacctcacctttatttaaaaaaaaaaaattaaaattagttgggtgtggtggtgcacacctgtagtctcagctactcaggagagtgacgtgggaggattgcgtcagcctaggaggcggagattgcagtgaaccaagattgtaccactgtacttcagtctgggtgacagagtgagaccccgtatcaaacaaacaaacaaagaaacaacataaacagttggccgggtgcggtggctcatgcctgtaatcccagcactttggaaggctgaggcagacggatcacgaggtcaggagttcaagaccagcctggccaaaatagtgaaactctgtctctactaaaattacaaaaattagctgggcatggtggtgcacacctgtagtcccagctactcgggaggctgaggcaggagaatcacttgaacccgggaggcagcggttgtagtgagctgagatcgcaccactgcactccagcctggcagcagagcaagactctgtctaaaaacaaaaaacaaaaaacaacaaaaaaaaacagtcgatgaacacatattttgcatgttctatctatcatatcctgttttcttacaatcaagtaagctagagaaaagaaaatgttattacaaaaatcacaaggaagagaaaatatgtttgctgttgattaaacataagtggatcatcagtcacaaaggtcttcatcctcatcatcttcaccttgagtaggaagaggaggggttggtcttgctgtctcaggggtggcagaggcagaagaaacttgacctgtgtagttcaagcccatgttcttcaatggccaacactgtgtcatgtaacttccacctctgtctagttccaagatattttctttttctttctttttttttttttttgagatggagtcttgctctattgtccaggctggagtgtagtggtgcgatctcagctcactccaacctctgcttcccaggttcaagcaattctcctgcctcagcctcctaagttgctgggattacaggcatgcgccacctcgcctggctaatttttgtatttttagtagagacggggtttccccatgttgctcaggctggtctcgaactcctgacctcttgatcggcccgccttggcctcccaaagtgctgggattacaggtatgagcacccgcgcctggctgacattttctttttatttatttatttatttatttatttatttatttatttaattttttttgagacaaggtcttactctgttgcccaggctggagtgcagtggcacgatcacggctcagtgtggcctccagctcctggggtcaagcaatcctcccacctcagccttcccagtagctgggaccgcagtcacacgccatcacaggtggctaacttattttttgtagagacggggttttgccgttttgcacaggctggtctcgaactcctgagctcaagtgatcgtccagcctctgcctcccaaagtgctgagattacaggcatgaactacacctggccctccaagacattttcatcacctcaaaagaagctctacccattaaacactccccatctcccctctcccagcgcaggcaaccatcaatctgctttctgtctctattaatttgcctgttctggacatttcatgtcaatggaatctcacactacatggccttttgtgtctggcttctctcacttggcatcatatttttgaggttcatccacattttaacacctgtgagtacttcatccatttcaatggccgaatagtatcccattgtgtggaaggaccatattttgtttatccattcatctgttgatggatgtttgttttgatttgttttgtttttgagatggagtctcgctctgttgcacaggctgaagtgcagtgacatgatcttggctcactgcaacctttgcctcccgggttcaagtgattctcctgtcttagcctcttgagtagttgggattacaggcgtgcggcatcacgctgggctaatttttgtatttttagtagtgacaaggtttcaccatgttggccaggctggtctcaaactcctgacttcaggtgatctgcccaccttggcctcccaaagtgctgggattacaggcatgagaccccatgtccagcccgttgatggatgtttggattgtttctgtcttttggctattgtgaatggtgctgttacaagctagggtgtattaatatttgttggagtctctgttttcaggtattttcagcagatacctgggagtggaattgctgggcgtgatagtaactccatgtttcactttttgaggatgacagcattgttttacagtgtgactgctcctcacatgggacctctgtgttgcctaccctgaggggtctttgattaataatggctaaatcaggccgggcgcagtggctcacgcctgtaatcccagcactttgggaggccgaggttgaattgcttgagctcagtagttggagaccagcttgggcaacatagtaagaccccatctctacaaaaaatacaaaaattagccaggcgtgctagtgcatgcctgtaatcccagctactcgggaggctgaggtggaaggatcgcttgagcctaggaggcggaggttgcagtgagctaagatcgcgccactccactccagcctgggtgacagagtgagaccctgtctcaataataataataataagaagaagaataagagtaatggcttaactagtgtaactctgggtgcagtccctggaccagcaagccttggcttgttgcaaatgcaaactccggggccccactcagatctgctgaatcacttctggaggtggggtccagccatgtgggtcttttcgagacccccaggtcagactctggtgcacgttaatcttgagaaccaatgcacatcccccaacaacaggtctcccagcaaccccatttaggtcagctgctgacccaataatgaccacacttccttcccaccttccccactttggcagtcattgagtgggagatagagcggagcctgctgagctcagaggaccgggaacagggagccaccgtcttccttagagagatccaagacctccacaaacacatccttgaagactgcgcccttaggatggtggaccggctcgcggatggctgcctggacgctgatgcccagaaccttctcagcagcctcaaaagtcacatcactgacatgcacccaggggtcctcaagacccaccgcctgccgtggagccgcgacttggtgaaccccaagaacaagactcacgcctgctacctgaaggagctgggtgagcagtttgtggtgagggccaatcaccaggtcctcacacgcctccgtgagctggatacggccggacaggagttggcgtggctctaccaagagatccgccaccacctttggcagagctcggaggtcattcagaccttctgcggacgccaggaactcctggcccggcttgggcagcagctcaggcacgatgacagcaagcagcacacccccctggtactctttgggcccccaggcattggaaagacagccctgatgtgcaagctggctgagcagatgccaaggctgctggggcacaagacagtgaccgtcctgcggctgctggggacgtcacaaatgagctcagatgcccgtggcctgctgaagagcatctgcttccaggtgtgcctggcctatgggctgcccttgccccctgcccaggttctggacgcccacaccagggtggtccagtttttccataccctcctccacactgtctcttgcagaaacttcgagtctctcgtgctcctgctggatgctatggatgacctggactctgtccgccatgctcggagggttccctggctgcctctcaactgccccccgagggtgcacctcatcctctcagcttgctcgggggcactgggggttttggacaccttgcagcgggtgctcctggacccggaggcctactgggaggtgaagcccctttccggaaaccaaggccagcagatgatccaactcctgctggcagctgcaaggaggacgctgagcccggtgcacacagatttgctctgggccagcctcccagagtgtgggaacccagggcggctgaggctggcgtttgaggaagcccggaaatgggcctctttcaccgtgcctgtcccgctggccaccaccgcagaggaagccacgcaccaactctgcacccgcctggagcagacacacgggcagctcctcgtggcccacgtgctgggctacattgtgtcttcccggtaagtctctgtgttttgaaactcttatttatttatttatgttttctttttttatttttagagatggaggtctggctatgtcacccaggctggagtgcagtggtgtgatcatagctcactgcagtctccaactcccaggctcaagtgatcctcacgcctcacctgctgagtagctgggactacgggcatgcaccactgtgcccagcaaaatataatttttttatttttatttttatttttagagataggggtctggctctgtcacccaggctggagtgcagtggcatgatcatagctcactgcagtctccaactcccaggctcaagtgatcctcccatctcagcctgccgagtagggtagctgggactacaggcatgcaccactgtgcccagctaaatacagtttttgtttgtcaactatacctcaaaagctgggaaaataaatacacacatgtaaaagaaagaaaggactgcctacatggttgcttagcctagtaaaagtctcggagctataaattgcaataaactaggccaggcgtggtggctcacacctgtaattccagcactttgggaggccgaggcgggcggatcacccaaggttgggagttggagaccagcctgacaaaacatggagaaactctgtctccactaaaaatacaaaaaattagccaggcgtggtggtgcatgcctgtaatcccagctacttgggaggctgaggtaggagaatcacttgaatccgggaggtggaggttgccgtgagccgagatcacgccattgcactccagcctgggcaacaagagcaaaactcgatctcaaaaaaaaaaaaaaaaatgcaataaacttgggtcatgatagtctggggccattgctcagagatgccagccaggtatggatgaggagtcaaaagtaacaagcatatattgctttttggatatagcaagaaaaagaaagaaagagagagagaaagagggaagaaaggcagacaggaaggaaggagacagaaaggaagagtgaaagaaggaaaggaaggaaggaaggagagagaaagaaaggaagagagaaagaaagagaaaggaaggaaggaaggaagggaggaaggaaggaaagaggcctggcatggtggcttacgcttttaatcgcagcactttgggaggccaaggcaggtggatcacttgaagtcaggaatttgagaccagtctggtcaacatggtgaaacctcatctcaactaagaatacaaaaattagcccggcatggtggcggtcacctgtaatcccagctgcttgggaggctgaggcaggagaatcacttgaacccgggaggcagaggttgcagtgagctgagatagtgccactgtgctccagcctgggcgacaaaggaagactccatctcaaaaagaaagagaaagagaaggaaggaaggaaggaaggaagatagtaagaaagaaaaaaaaagaaggaaagaagagataaaggaaagaaagaaagagaaagagagaaaaagggaaagaaggaaagaggaaagaagaaaggaaggaaagaaaagaagaagggaagaagaagaagaaaaagtgaaaggaaggaaggaaggaaggaagcaaaagcaaaaataacaagcagcagagaggaaggggttaatcagaagcacccaagcagccacactccctcctctgagtttgtcctctgccaattggcagagacgccaaggaacaaaactttgcctttactgcaactggccaacagcaaacactcaaaaccatcatccaaaatgctggacgacatagttttgcctcttctcagttttagggttgttttttttttttctcagcctgtgccatttcagacctttgtcggttaccacaaattcatctagagggtggtggtcaacccaacgaggaggtctttctgcctgtttctttgccagaaatagaaacacattcatgctagtgtaggaaataagagaatatgctgggtgcagtagctcactcctgtaatgccagcgttttgggaggctgaggtgggaggatcacttgaatccaggagtttgagaccagcctagacaacagagtgaggcccctgtctatacaacaattttttttaattagctgagcatggtggtgctactccggaggctgagatgggaggatcacttgagcacaggagttgaagactgcagtaagccataattgtgccactgggcttccttccaatgaagagttagggaaattcaagtctgtcttatagctgactccaggggacatatcccagatttcccgactggcttacactctataagagtacaaatacggcgtggtgtggtggctcacacccgtaatcccagcactttgggaggccaaggtgggagaattacttgagcccaggagttcaagaccagcctgggcaacaaagtgagagcccctgcctcagtgaaaagtaaaaatattagctgggcgtggtggctcacacctgtagtcccagctactcgggaggctgaggcaggaggatttgttgagccaggaggtcatggctgcagtgagctgtgatcatgccactgcactccagtctgggcaacagagcaagaccctgtctccaaaaacagtgcaaataacaactggggcatgttccagaatagaggggtggcccattgggccattctgttgaagttgacttggaggaagtgagttgtcatggaaactgtcataaaaatcagagcagcttctccttccttctccctctggggtcctctctgcacatcaactcctcttgtagactcttccttcggcccctctggaacttcagcttgccttgagccacagttggcatcaggagcccatatttctgtgaccaggtgccatcttactgactttttctttgggtcctaattccaaagtacagggagacagaaatcaaatggcctacttggtcccatatctggtccaattagtaaagccagatctctcacaggggtggcgggggaggtggtttataaagcatgatgataaggtggatgattttggttgctccagttccatgaaaatatgttatgcttacacatcagatccatgtggcaggatggtgagagctttgctcttggagcagacctgagatccttctaggctagaggtcgtcacctcaggatagttctccacgccccccatccccccacaggggacactagacagtgtgtctggaagcatttttggttgtcatgactgagcagggtggtgctcctggtgtctttactgagtggagtccagggatgctgtttaacaccctacagtgcaaaggattgtcctactttagagaatgatccagccccagatgttgatagtgcagagagtaagaaaccttgccttagcctgagagaccctatccattcatccatccatcaatccctccctccctccctccatcatctctatcatccatccatccatccatccatccatccatccatccattcatcaattcgacctttcatccatccattgtctctatcttccatccatctatccatcatctcaatcctccatccttccatccattctctctaaattccatctatccttccatccatcatctctatcttccttttatccatcatctctatcttccatctatccatccatccatccatccatccatccacccatcatctcgatcttccttccatccatcatctctatcatccatccatctattcatctatctatccatcatcttgacctttcatccatccgtccatcatctctatcttccatccatctatccatcatctcgatcttccatccttccgtccattctctctaaatccatctatccatccatccatcatctccatcttccatccatctatccatcatctctatattccatccatccatccacccatcatgtctatcttccatccatccatccatccacccattgtttctatcttctttccatccatcatctctatcatccatccacccatcatctctatcttccatccatctatccatccgtctatccgcccatcatttctatcttcctcccatccatcatctctattttccatccatccatccatccatccatccatccatccatccatccatcatctctatcttccattcatctatccatcatctcgatcttccatccttccacccattctctctaaagtccatctatccttccatccatcatctgtcttccttttatccatcatctctatcttccatccatccatccatccactctattcttccttgcatccatcatctctatcttccatccatccatcatctctagcatccatccatccatccatcatctctatcttccttccatccatcatctctatagccatccatccatccacccacctatcatctctatcatccatccatccatccatccatccatccacacatcatctctatcttccctgcatccatcatctctatcttccatccatccatccattcatccacccatccgtcatatctatctatctatgtctatctctatatatctatatatttctctatgtcccatcgataaatatgtatagtctcaatctatctctatcacttctagtaatctatcattgtatctctctaccatctgtctatacctatctaactctatatctatcccacatctacaaatacatcattttaatctatccacctatttaaatgatctatttatctatcatctctatttctatccatctagtcatttataatcaatcaataaatctctatatctatctctctatttctcatctatatcgatcctgtctatcattaatatctctctctctcttttttggggggggacagggtctcactctcttgacccagactggagtgcactgaagcgatcacagctcgccgcagtcttgacttcttgggctcaagcgatcctcccatctcagccccctctgagtagctgagactacaggtgcatgccaccacacccagttatttatttcttcttttttttctttgagacagagtctcactctgttgcttagcctggaatgcagtggtgcaatctcagctcactgcaacctccgcctcctaggttcaaatgattctcatgtctcagcctctcaagtagctgggattacaggcgtgcaccaccatgcctggctaatttttgtatctttagtagagacagggttttgccatattggccaggctggtctcgaactcctggcctcaaataatctgccaccttggcctcccaaagtgctaggattacaggaatgagccaccacatccagccttatttatttatttatttatttatttatttagtagagatggggtctcactatgttgcccaggctgctctcaaactcctgggctcaagcgatcctcccaccttggcctcccaaagtgctgggattacaggcgtgagccaccgtacctggcctataatctatctctgtatatacagttggctcttgaacaaactgggagttaggggaaccagctgtctcccaacgtacctcaaaattgatgtataacttttgactcccctaaaacttaaatactaatagcctactgttgaccagaagccttaccagtaacataaatggtcgacgaacatgtatttcatatgttctatgtattacagactgtattcctacaacaaaacaaggtagagaaaagaaaatgatagtaagaaaatcataaaggggggctgggcatggtggctcatgcttttaattccagctacttgggaggctgagtacgagaattgcttgaacctgggaggcggaggttgcagtgagcctagatcacgccattgcacttgagcctgggtgacagagcaagactctgcctcaaaaaaatagaaaataataaggaagaaaaatacatgtactattcatgaagtggaagtggatatcacaaaggtcttcatccttgtcatcttcacattgagtaggcagaggaagaggaggaagaggggaggaggagaaggggacttggtcttgctgtctcagagacagcacaggcggaagaaaatccacatataagtggactcatgcagttcaaacctgtgttcttcaagggtcaactatatgtctatctgcctatttatatctatttatctatcatctgtctatttatctttatgtttatctatctctgtatctattgctctatctcttatttatctctccatataatctgtctatctataatctatatgcctatctatacatctgcctgtctatcatgctaccagcatctagtgggtggaggcttgggtggagactgctacacatcctacaataggggtccccatcccccagtaccggtactgctccgtggcctgttaggaaccaggctgcacagcaggaggtgagcagtgggcgaacaagtgaagcttcatctgtatctacagccacttcttgctgctcctcatcactcccattaccacccgagctccccctcttgtcaggtcagcagcatcattagattctcataagagcacaaaccttgttgggaactgcgcatatgagggatctaggttgcttgaaccttatgagaatctaatgcctgatgacctgtcactgtctcccatcacccccagatgggactgtctactttcaggaaaacaagctcagggctcccactgattctacatgatggggagttgtagaattatttcgttatatattgcaatgtaataataatagaaataaagtgtgcaagtgtgatgcacttgatcatcccaaaaccatcacccctaccctggtccgcgggaaaaaaattgtcttccaagaaaccggtccctggtgccaaaaagactggggactgctgccctacaacacacaggacggtccccaccctaaaaaatgatctgaccccaaacatcaaccatgcgagcccaagaaacgctgcactcagcatgccctgtgccctctgggagcctcacttcctcctccgcatggaggggctggttgggagagcatccatcctccaaggctactggaaggaccaatgagatcatactcgccagaataagagttcagaaaaagaggaactagtgcattttcttcttagccctcaacagttttgcttttggcagatgaggaaactgaggcaaagagaaggtacattcctcaccaaggtctcccagctaggctcaaacgcaagcctgatgaccatgcacagccctgttttgcaattcaggctaggcgggtcctctgggagtgccaagtgaggtgcccgctctgaggttcgcattgcttaggggatgtcttcagggatgaagataggctctcaacctagcggttcacccatgaccaggggcacatctcctaggctctgtctgataccatatcatagaattttgcaggccaggtgcagtggctcacgcctaatcccaacactttgggaggctgaggcaggcagatcacctgagatcaggagttgaacagcagcctggccaacatagtgaaaccccatctctactaaaaatacaaaaattagccgggcgtggtggtgcacacctgtagtcccagctacatgggaggctgaggcaggagaatcgcttgaagccaggaggcagagattgcagtgagctgagatggcgccactgaactccaacctaggcaacagagtgagactctgtctcaaaaaaaaaaaaagaattttggaaagagtacagtgttgggtatgacattattaccaatatggtaactacaagccacaaaaactatggaacacttgaaaggtgcttcacacaactcagaaactgaatttaaaactttgaaagatggttcatgcaaccaagaaaccgcattttgaattttattaatttttaaccagtttaactttatttgtatttatttgttcatgtatttatgtatttattttagagacagggcctcactcttttgcccagtctggagtgcagtgatgtaatcacagctcactgcagcctcaacctcctgggctcaagtgatcctcccacctcagcctctagagtagcagggactacaggtgtgtgcccctatgcccagctaatttttaaatttttttgtagagatggggtctccctttgttgcctaggctggtcttgagctctggcctcgagcagtcctcctgcctcagcctcccaaagtgcagggattacaggtgtgagccaccacgcccagcccaattatcctaatttaaagacaagccttggtgggccagggtggagtggggtaggtgcagttggtttctgcattattttccttgagttaccacttccctccctatagtgtctgtctcagaccccttcgaggttgaggagcgggccatttatggttctgtaggtgtgcatgcagaggaaaagattggcactttgggagaccgaggcaggtggatcacgaggtcaggagttggagaccagcttgactaacatggtgaaaccccgtctctactaaaaatgcaaaaattagccaggcgtggtggcgcctgtagtcccagctactcaggagactgaggcaggagaatcgcttgaacccgcgaggcggaggttgcagtgagccgagattgcaccactgcactccaacctgggcgacagagtgaaactctgtctcaaaaaaaaaaaaaaaaaaaaaaaaaaaatcggaaaaggtcttccttggtgggtattgccctaaccgtgcttggtaccttgtgggcgctgtccaaatgctgatcccaggtgatgtgctggacaccgcgcgggtggctgtatccctccctctcttggattctgcatcctccaaatgcagaagacatgagatgtgcctcaaagccccactggtcctcccttcagacacggtctctcggaggcggagctgaaggatgttttgtccctggacgacgaggtcctgcaggatgtgtaccgagattggaccccgcccagcaaggagctgctgcgcttcccgcccctgctgtgggtgcggcttcgtcgggatctgggatactacttggcccggcggcccgtggatggcttcaccctcctggccattgcccacaggtaggtccaggcagcagtggcagcgacactgtctgggtgggaccccaagaatgaggactcactggccgggggtcttctcagtatcagatccttcacttaccattcccagggaatcaagtccagttagaactctgacacaattcacttatttttaaaattgagttgaggctggaagcagtggctcatgcctataatcccagcactttgtggggccagggcaggaggattgctggaggccaggagttggagatcagcctgggcaacgtagcgaggccccatctctacaaaaaaaataagaaaattagctaggtgtgttagcactttgggaggctgaggtggcggatcacctgaggtcaggagtttgagaccagtctgaccaacatggtgaaaccctgtctctattaaaaatacaaaaattagccagacgcggtggcacgtgcctgtaatcccagctgctcgggaggctgaggctggagaatcacttgaacctgggaggcagaggtggcagtgagccaagatcgcaccactgtactccagcctggcaacagagcgagactccatttcaaaaaaaagaaaattagctgggtgtgatggtacacacttgtggtcccagctacttgggaggctgaggtgggaggatcacttgagcccaggagtttgaggccacactgagccgtgactgtaccactgcactccagtctgggtgacagagtgagatcctgtttcaaactaaactaaactagactaaactaaactaaactaaactaaactaggtgaagttcatgaaacataaaattcaccattttattttattttattttattttattttattttattttattttatgtattttgagacagggtctcgcccaggctgcagtacagtggttgtcatcatggctcactgcagcctcaaactcctggactcaagcaaccctcccacctcagcctccggagtagctggaactacaggcatgcaccaccatgcctggctaatttttaaatttttttgtggagatggggtctcaccacattgcccaggctggtctcgagctcctgggctcaagagacacacccacatcggcctcccaaagtgctgggattacaggtgtgagctaccatgcctggccaattcaccacattttattttatttatttaattttattttattattttttgagacagagtcttgctctgttgcccaggctagagtgcagcggcacaatcttggctcactgcaacctctgcctcccaggtttcagcgattctcctgccttagcttcctgagtagctaggtttacaagcatgagccaccacacccagctaatttttgtatttttagtagagacgggtttcaccatgttggccacgctggtctcaaactcctgacctcaggtgatctgcccgccttggcctcccaaagtgctggggttacaggcgtgagccactgtgcccagtcagaattttaaagttgacaattgagtggtattttagtacactcataatgttgcacccctcacctctgtctagttccagaacgttttcatctccccaaaaggagaccctgtccccatcagccgtcactcctcattccccttccctaacccctggcagccactcatctgcttcctgtctctgtggatttgcctgttctgggcatttcagatcaacgaaatctcacactatgtggccttttgtgtctggcttctttcactcagcattatgttctcagggctcatccacattgtagcagggatcagtgcttccttccttttcatggctacataatatttcattgtatggatggaccaggttttgtttatcttcgtctatggatggacacttgcattgtttccacgtttttgctgttgtgaacatgcatgtgtaaggttttgtttgaacacctgttccctttctttctctttctttctttctttccttctttctctttttttccttttttctttttggagtctctctctgttgcccaggctggagtgcagtggcaccacctcagctcactgcaacctccacctgggaggagtgattctcctgcctcagcctcccaagagcacaccaccacgcccagctaatttttgtattcttttttttagtacagacagggtttcaccacgttggccaggctggtcttgaactcctgacctcaggtgatgcacccgcctcagcctcccaaagtgctgggatcacaggcatgagccactgcacccagcctgaacacctgtttcttaattctcggtatatacccaggagtggatttgctgggtcaggtggtaagttattttatgtgtaaattttggaggagctcaaatgttcctctttgaaatgtatgtaaggaaagtaaattgatgtaaggaaaaaaaaaacacggaccaatttagagatagatgtgatgtatcaaatagcacaggtggtcaacagagtggtttaggatggcttgggatttgggaactgcctccaggaagacaagcagccacctttgagcttgatgggtcacccaggtctatcagtctgtataccctctctgtagacagctggtcgaggtggtccgtgagcgctacctgtcaggatccgagagagccaagaggcatggcgtcctggccgacttcttctcagggacctggagccagggtaccaagaagctcatcactctgccacttgtggggaaaccactgaacttggaccgaaaggtgaggtacctgggacccccattccccacctgcaacctccaccctgcctggcattgctcacctccttccttcccctttttgcactcgaaatgtcctcccgacctacttctcctttccgcacagagggcaagatgtcccttctactgtcccccccactcctttttttttttttttttgagacagagtcttactctgtcgcccaggctggagtgcaatggcgtgatctcagctcactgcaacctctgcctcccaggttcaagccattttcctgcctcagcctcccaagtagctgggattacaggcacccgccaccatgcctggctaatttttgtatttttagtagagacggggtttcaccacgttggccatactggtctcgaactcctgcctgggcaacagagagaaactctgtctcaaaaacaaacaaacaaacaaagtacagagttattgtggactcttctccctgatgttaaaatcttatataactgttgtataatgattgcaactaggaaattacacttttaattctttggttatagcttgatgtttctttttctctgtcttccctgctggactggggaggctggaggcaggaccaggctctattctttttttggtgctgccttttctttttccctccctcgcttccttccttccttccttcctgacagagtcttgctctgtcacccaggctggagttcactggcatgatctcaggtcactacagcctctgcctcccaggttcaagcgattctcccactcagcctccctagtacctgggactacaggtgtgtgccactgcacctggctaatttttgtatttttagtagagacggggttttgccatgttggccaggctggtctcgaactcctgatctcaagtgatctgccttggcctcccaaagcactgagattacaggcgtgtaattacaggtgggattaccacacctagcctggtgctgacccttctcttctccccccgagacccattcacaaatcctttcctgtgtgcccagagtccctgcagactcagcttcatcctgcctctccaggacatggtctgagcccctttcattcacctagcctctcagtctcttgccctagtgcatcctcccaaggatgcttctgaccatccaatctgattatgattatgcctcttgtctaaaaccttccatagctccccagtgccctcagtcttgagcctgacctacccagcctgatattcagtgccttcgtgatctgctgcttacaagctccctactctcatttcccacccgcatcccctaacctgacttgtataattcagtcctcccaaactcagcctgctctttcacacctccagacctttgcccatgctgttcccttgccctggaatgccattgttttctgacacattttgccacatagatgcccacttaattctgaggctcagttccgatgcctctgccttcaggaaacattccctattcctcccagaaagtcccatgacctctggctttgattctctgagtcccagatgtcgtcctctgctccagccctgaccaatgggcacatgggggtatgtctgtcttccattgcattctcgtccactccagcactgtctggagcatgaggtgaatgaatgggcttgtgcgtggagtgaatgaatgggtttgtgtccaagctgcagtctcccttctcctctgccaggtggccccgcagcctctgtggttctcacatacggttgcaaacctgcggaagctgaaggagttgccctatcacctgcttcactcgggccgcctggaggagctgaaacaggaggttctgggtaagggctgccccccatctcagaggaccgagcctggtgactgcaccacgctccagtcttctagagcctggggagggtgaagggcaaacatggaaatccttcgttcctcctaaggcagaggttctcacaaggggcaattctacacccaggggatgccttacagtgtccgcagatagttttggttgtcacagctaggggagaaggcactacttgaatctggtgggtggaggccaggaatgctgcttaataccctacagtgcacaggacaccctaccacagaaaataatctagctccaaatgttggtgcatagagtgaaaacccctgccttatcatgagagaccctatctgtctgtctgtctatttgtcagtctgttcatccacctatccatccatccatccatccacccatcttctgtccatccatccatccatccatccatccatccatccatccatctaactatccatttatccacccatccatctatgatctccttattgagccatgagctggttataaccatccatccatccatccatccatccactcatccttctgtctgtccatccatccatccatcattctatctatctatccatgcacccattatatgtccattatctattcattcatctacctttctggtcatccatccatccatccacccatcattctatccatccacccacctatctttctgtttgtccatccatgcaccaatccacccaacattctttctatctccctctctctctctctctatccatccattcaccaatccccgtgattcttaaccagaagagattctgcccccccaggggacacttgacaatgtctgcagacatgtttgattgtcacacttggggtgggagtgctactggtatctggtgggtggaggccagggttgctgctttacatcccacaatgcatagttcagccccttaccacagagaatgatcctgccccagtgtcactactgctgagcctgagatgccctggaggaaatggagagatgattctccacctcccaggatgaactggagggaggtaggcacttcccacatcctccccccttctctccctcaggcagcatgagctggatttcctgccggggcatctctgggggcattgaagacctgctggatgactttgacctgtgtgcccctcacctggactcccctgaggttggcctggtccgtgaagccctccagctctgccgccctgctgtggagctccgaggcatgggtgagtccagatggcctggataggagtgaccaggacgggcactgacttctagaaacatgctctcctcattgagtcatgagctggattttcatcaattctcatacctttcctgtctaaacatgtgaattttcccccagcagtgcttctagaattttttttgacatgtggtatcgctgtgtcacccaggctggagttcagtggtgcaatcgtagctcactgtagcctcagactcctgggttcaaatgctcctcccacctcagcctcctgagtagctaggaccacaggtatgcaccactgtgccttgctaatttttctatttttcgtagagacagggtctcactgtgttgcccaggctagtctcaaactcctgggctcaagggatcttcttgcctcagcctcccagagtgctaggattatagatagacatgagccatggcgcctggcctagaattttaaattgagcctgggagagctttggactgaatactaccaaagcagggcccatcctgttgccctggacttttctttagaaagtgccaggtagggctgggcgcagtggctcacacctgtaatcccagcactctgggaagccgaggcaggcagatcacaaggtcagaagtttgagaccagcctggtcaatatggtgaaaccctgtctctactaaaaatacaaaaattagcagggtgtggtggtgggcacctgtagtcccagctactcgggaggctgaggcaggagaattgctggaacctgggaggcggaggttacagtgagccgagatcgcaccactgcactccagcctgggcaacagagtgagactccgtctcaaaaaaaaaaaaaaaaaaagaaagaaagaaaagaaagcaccagataggaactatttcgagaaaactcgaggaaattatgtaggtacatatatgataagagagaaaacaaagttcccacatattttttattgatgaaattcaaaatataataataactgagtacaaaacttcaggttcagagttggttttcactattatctggtccattgcaaacacatggctgtaaaaattattctcaggctgagcatgatggcttacacctgtagtcccagctacttgggaaggtgaggtgggaggatcaattgagcctgggaggtcgaggctgcagtaaactgtgattgctccgctgcattccagcctgggtgacagagcgagaccctgtctcaaaacgaacaaaccaaaaaaaaacttatttctagctcccagatgacttgggctgggtctggccctcagactgcaatttgctactccctgccctagagcttgaagaatctctccaagtctttagacgctctggccatgaggatgttctgtttggttttgttttaattatagcaaaatacatgtcttaaccattttttttttttgagacaggatctcgcttcattacccaggctagagtacagtggcatgatctcagctcactgcaacctccgcctatcaggctcaagagatcctcctacctcagccttctgagtagctgagactactgacatgtatcatcatgcctggctaatttttgtatattttgtagagacgggattttgccatgtttcacaggcaggtcttgaactcctggactcaagcaatcctcctgcctcagactcccaaagtgctgggatgacaggcatgaaccactgtgcctgacccccatcttaaccatttttatgtgtgcagttcagtgattaaatatattaataatgtgcagctatcaccaccattcatctccagaacttgttaatcttcctaaagtgaaactctgttttcattaaacattcactccctgtactagtctgttttcacactgctataaagaaacacccaagactgggtaatttacaaaggaaagaggtttaattgactcatagttctgcatggctgggaaggcctcaggaaacttacaatcatggcagaagggaaagaggtgcgtctttttttttttttttttttttttttttggtgagacagagtctcgctctgtcgcccaggctggagtgcagtggtgcgatctcggctcactgcaagctccgcctcctgggttcatgcatggcagcaggcgagagagagggagcaactgccttataaaaccatcggacggccaggtgtggtggctcacgcctataatcccagcactttgggaggccgaggcaggcagatcacttgaggtcaggagtttgagaccagcctggccaacatggtgaaaccccagctctactaaaaatacaaaaatttgtcaggcgtggtggcacatgcctgtagttccagctacttgagaggctgaggtgggaaaattgcttgaacacgggcggcagaggttgcagtgaccagaaatcccaccatgcactccagcctgggtgacagagtgagactgtgtctccaataaaacccaaaaaaccatcagatctcgtgaaaactcactgtcatgagaacagcatgggggaaccacccccatgatccaatcacctcccacctggtccctccctcaacatgtggggattatggggattacaattcaagatgagatttgggtagggacacagagccaacccatatctctccccattctcccttcaccccagtccctggcaaccaccatgctattttctgtctctataaatttgactgctttaggtatttcatataagtggtattttacagtatttgtcctttattctctgacttctcttactgagcagaatgtcctcaagtttcatccacattgtagcatatgtcagaatttccttcctttttttttttttttttttttttttgcacgacagagtctcgctctgtcacccaggctggagtgcagtggcacgatctcagctcaccgcaacctccacctcctgggttgctcaagcaattgtcctgcctcagcctccagagtagctgggattacaggtgtgtgccaccacatgcagctaatttttgtattttttagtagagatggggttttgctatgttagccaggctggtctcgaactcctgacctcatgtgatctgcccaccttggcctcccaaagtgctgggattacaggcttgagctaccatgcctggctaagaatttccttccttttcaaggctaagaatttccttccttttaaaggcttaataatattgcattgtatgaatatgccacattttgtttatccgttcatctgtctgtggacatttgtgtgtttctaccttttggatattgtgaaaaggaatcactagatcacatggaaattttgtgtttaactttttgaggaacgaccacttcattttccacaaaagctacaccattttataatcaaactatgggagacaataaataatatctttttctctacccttttatgttcagtgataggggcctgtgaattaagacagcttaacaggagaaagggctcacacattttaattttacatgcacagaagtttcacagaaaagtgaaaactcaaaggagtgtttagacctggggccttaaataccatgttaacaaagagcaataaattgtgagctgaattcacaaaggaagggggagtattcaagatgcttaagtctctgtatccaaagtgcttccccatggatgtgaataggatgttaaaaaggatgaccagtggcctgtgattcctatgcagagcttctaatcctggccctgcaaaccatccttgaactatctgcttctctttattctcctggccatcagcccagggccagtgctgctgtctctcctccagacagcatcctcggaggtctgcctactttggattcattcttaccctttggtttattttccatacagcactcagaagaatcttgaaagcccaaaacggccggggtggctcaagcctgttatctcggcactttgggaggctgaggcaggtggatcacttgatgccaggtgttcaagagacagggaacaaaagctgggaaaattgccttataaaaccatcagatggccaggtgtggtggctcatgcctataatcccagcacttcgggaggctgaggcaggcagatcacttgaggtcaggagtttgagaccagcctggccaacagggtgaaaccccatctctactaaaaatgcaaaaattagccaggcacggtagcacgcacctgtaatcccagttactcgggaggctgaggcaggagaattgcttgaacccagcaggcagaggttgcagtgagccgggatcacaccactgcactccagccttggcgacagagcaaaattccattaaaaaaaaaaaagagcccaaatctcactaagtatctctattgaatcttctagatggttctcccattgtccttgggataatgacctttccagtactgtagcctacatggctgtgtatgactcactctcctgggagatgcttgtctccatccttactgccccagacagtgatggaaacatccaagcttgcgtgccgggggccctgggctgggactcgcctcccccagcccttctgtggcaactttggagctcagctaaatgcgattcctcagagaagccttgtctggccaccactgaagcttaacttctctatgtctccccgatccttgcctctgaattttctatcactgcaccctgttttccatctgtcttggctctttttcttttttctttttttagagacaaagtcttgccctgttgtccaggctggagtgcaatggcatgatcatagcgcacagcaccttcaaactcctgggctccagtggtcctctcacctcagcctcccaagtagctgggaccacaggtgcacaccaccacccctggcttgtctttgcctttaattatgatttctcttggttttcttttgcatcatctgtctgccacatcagactctgagctccataaggccaatggcatcatctgttttctccctgccaaatttttacctttaacacattgatatggtttggctgtgtccccacccagctatcatcttgaattgtatttcccataatccccacacattgagggagggaccaggtggagataatcgaatcatggaggtgttttcctccatgctgttctcctgatactgagtaagctctcaagagatctgatggggctttttaaaataaggggcttccccctttgctcagctctcattcttctctctcctcccgccttgtgaagaagggcgtgtttgcttccccttccaccgtgattgtaagtttcctgaggcctccccagccctgcagaactgtaggtcaattaaacctctttcctttataaattacccagtttcaggtatgtctttattagcagcatgagaacagacaaatacacacagagaccacaaattttgagccccaccgtgtccattgaaatcttggcgctgccacttcttggcagtgtgaccttgcaaaccctttaccatccctccccctgccccacagccctcagttttcccatctgcagaatagggatgctgagtgaccatcccacctagggctgctgggaagagtacgcgcatcagttcacacagaacctccacccgtgttgccatcgagggtcctgttactgtcatatgatagcattgttgacatgaatagcctaggatgagctatttctgccctgaaaccctatttttgtcatctgcaaaatgtgcaattgaactaaaatgtgtccagaactccacccaatgtgaagatgctggtgcctgcaatcatttatgcctttcttatgcattcacacaacccctactgattatctgccatagccccagctcccacagggacctaaatatagttaatgtttgtctcagcctttaagagagggagatggggccgagtgcgggggttcacgcttctaatcccagcactttgggaggcccagacagaaggattgctagagggcaggagttcaagaccatcctgggcaacatagcgagaccctatctctgtaaaaaaaaattaattagttaaaaatagatagatggctgggcacagtggctcacgcctgtaaccccaatactttgagaagccgaggcaggcagattgcttgaggccaggagtttgagaccagccttggtgacagtgaaaccccatctctactaaaaatacaaaaattagccgggtgtggtggtgcatgcctgtaatcccagcttcttgggaggctgaggcacgaaaattgcttgaacccgggaggcagatgttgcggtgagccgagatcacgccaccgcactccaacttgcacgacagagcaagactctgtctcaaaatacacaaataaataaagagaaggagatggaacagcataccaaacaactggaatttaaggcaactggaaagaaaaataacgcgagaggcgctcgccaggagttgtaaaccttgatggagcaacttcccaggaaaacagccttgggcatgacttcccattttaaggaagatttaaaagcccagatctctcagcaagttccctgcaaagccccttgattgacaacctgtggctcccccagcacaaggaggaggtgtaggaacaaatgttatcaccagagggcgctgctggacaaccatgtgctctccgtacatccaagcacgctggcgaatggggaccattcaacataacatcctaaatgatccaacgcgatcacgagtccttttttttttttttttttgagaaggagcctcgctctgtcacccaacttctgcctcctgggttccagcgattctcctgtctcagcctcccgagtagctgggattacaggcctgcgcgccaccatgctcggctaatttttcttaatagcccattttttaatagaacggttttaggttcacagcaaaattgagtgaaaggtacaaagatttccaatatatccctcctctgatcctacttttattgaaaaggttgagtctgagcacagtggctcacgcctataattccagagctttgaggggtcgaggaaggaggatatcttgagcccagaagtttgagaccagcctgggcaacataacgagaccccgtctctacaaaaaataaaaaactaacgaggcgtggtgacgtgcatctgcagtcccagctaatatagaggctgtggccggaagatcgcttgagcccaggagtttgaggctgcagtgagctgcgatcgtgccactgcactccagcctgggtgacagagtaagaccctgtctctaaaaaaataaatagccaggcgcggtggctcatgcctgtaatcccagcactttaggaggccgaggcaggtggatcacttgaggtcagcccagccaacatggtgaaaccccgtttccactagacacacaaaaattagttgggcctggtggcgggcacctgtagtcccagctattagggaggctgaggcaggagaatcgcttgaacctgggaggtgcaggttgcagtgagccaagatcgcaccattgcactccaacctaggtgacaggctaaaattccatctcaaaaataaataaataaaataaaataaaacaaacaaataaattagctgagtgtggtggcgcatgcctgtagtccctagtatttgggaggctgagatgggaggattgcttgagcccagaagtttgaggctgcagttagctttgatcatgccactgcactccagccgggacaacagagtgtgataaaagaggaaggaagaaaggaagggagagagggagagaagaagggagggaggaaggaaagggaagcattctaggcaacctgggcaaaggctggagactggaaacagctgggtgcctctgaagcaagggtaagtgtgtctggagagcagagaaggagacaggagcggacagcagaggccagtagctgaggtattgtgtcttcttttgttctggagcccctgcagggagcagagactcaattggcagggagggtagagggggctcaatccaggcaacttagtctacatccctttgttgcagagaggagcctcctgtacacagaactgctggccagactccatttcttcgccacctcacatccagcactggtgggacagctatgccaacaggcccagagctggttccagttgtgcgcacaccctgtgctggtgcccctcggaggattcctccagcccccgggaggacccctccgggcaactctcagcggctgtcacaaaggtgagtctccccagcatagcaaaaatcccagcaggcacctgcttgcctgggggcagtgaaggccaggtgtttgaggttgtcctctgggactcccctgtgctagttgggaggccccaagcttgccatcagagcctgcccctgctgtctcatgctgaatcagctctctctgccccacctcaagggactgtagatgtctcatataaattcttctaatgagcccgatgctagggggtgcctccaagcttcccatctccaagggattggtgcccatctgacagtttcagctatttacaagctcatgctagtaattctgaaagctaggaactgatgcctgacagtcctctgagaagctgaaggaactgtaagcagcccttggaatcccagaatgtaagggagaggagaggatttaggttttgccatccatttgtcattcatttttttcttccttccattcatccaaccatctatgcatccatcctttcattcaccttcctactcttccatccaattaccctcccatccattcattcatctctctatctacctcccacccttccattcatctatccatccatccaccagcctcccacccacccatccattcatccatccatctatccatccatccatccatccatccatccatccatccattaattcaccttcctactcttccatccaattaccctcccatccattcatccatctatctacactcccacccttccattcatctatccatccatccatccaccgtcctcccacccacccatccattcatccacccatcttctctgccacccttccatccatctactgccccatccatccatccatccatccaccttcccactctcccatccatctatcctcccacccttccatccatctatccatccattcactcatccacccacccattcatacatcagttgtccattcatccaatcatctacccacccttccatttatccatcaattcatctatcaaaccactttcctctccatccatccatccatccatcctcccacccatccacccatccatctacccaccctgctacctttccatccatctatcccccatctctaaatccatctaccctcccactctttcattcatctactgttccactgttccatccatccacccatccacccatccatccatctatccatctaccctaccactgtttcatttatctagccccattcatccatccacccatccgttattcatcgattcatcaaatcatttactcaccttttcattaatctatccatccatccattcatcaaatcaccttcccatcctttcatccgtccatccacccacccttccatccactcacccacctacacacctttccttccatccatccactcacccatccattcatccattcattcatccttcaaccctttctttcttccttccttcctctcttctatccacccatcagtcatccacccctctacccacttatccttccattttcttcatctgatcatcttccattcattcacttacgcctccacccatccacacacttagccattcatcaactttctcacttcaatttcatcgagaaactgattcctccatctacccatctacctgcccatccattcacccactcactcatccaactagccacctgtctacccactcatttacctccattcacccatctatttatctgcccacccacaatctctcacactgattgtgagaccactgagttcacttgtggttcaaatgtcagagctccttactgtgccacatgacctggcagtgagagctgcactccccaggcacattattttcaaaatagaaatgctaagagacactaagtacaatgcatggaggagttgatttaggggcagccactagaatgctgtgttgaggattctaagactgaagctagcttagtgggaaagagtgtgtatttgttagaatataggctcagatgttgtaaaaaaaaatggccaaaatatcagtggcttaaataagataggagtttaattctctcttttgaaatagttcaagcaaaagcagaggcaagagggagtctttagggtgtctgggacccatactctttcagtctggcgctctgccattttcagtgtagggctgtcctcgttggcccaatatagctgctccaactcctaccatcaagatggcattccagccagtggggaataggagaagcagatggcaggcctcttcattttaagggcacgacctggaagcagaactaaatatttccactcctgtctcattggcaagaacttggatatctccaactgtaaggaagcctgggaaatatgtttttatatttttatttttatttttactttttatatggagttttgttcttgtcgcccaggctggagtgcagtggcgcaatctcggctcactgcacctctgcttcccagattcaagccattttcctgcctcagcctcccaagtagctgggattacaggcacatgccaccatgcctggctaatttttgtattcttggtagagacagggtttcaccatgttggccaggctggtctcaaactcctgacctcaggtgatcgcctaccttggcctcccaaagtgctgggattacagggttgagccactgtgctcagccagggaaatgtggtctttgtgcggataactatgtactcagctaaaacctgtaggcttttgggttttattactaaaggtgagatgatagaatgactatgggggcacaaatcgcacatagtgctgtgattgattaatgatgtctgtcatggcacaggcataggaagttacagcttagcgtgacatttttctcatctctggggcagggaaatgttctgtgtttcagatccactgtgccccgctgtacatcctctagttctgttaaagttgagaaagttcttacctgtgtggacttcagtttgttcatttttaatatgaaaagtatggccaggcatggtggctcacgcctgtaatcccagcgctttgggaggttgaggcaggtggatcatgagatcaggagttcaagaccagcctggcctacatggtgaaaccctgtctctactaaaaatacaaaaattagccgggcgttgtagcggacacctgtaatcccagctactctggaggctgaggcaggagaattgcttgaaactggaaggcggaggttgcagtgagcggagatcgttccactgcactccagcctgggcgaaagagtaaaactccgtctcacaaaaaaaaaaaaaatgaaaagtatgagttaatatttccaaggtcacacaatgagtgcataagaaaaaaagtaaaaggggctgagcacagtgatttatgcctataatcccagctctttgggaggccaaggcaagaagatctcttgggccgagatgttcaagaccagcctgggcaacataaggagaccttgcctctacaaaaagttaaaaaaaaaaaaaaaaaaaaaagctggtcatggtggtatgtgcctatagtctcagctactcaggaggctaagatgggagaatggcttgagcccaagagttcgaggctgcagtgagctgtgattgtggcactgcactccagcctgggtgatagagtgagaccctatctgaaaaaaaaaaagaagaagaaaaggaagggaaggagagtggggaggggaagggagggaaaggagagggaagagggaaggaactggagggaagggaaagggaactggagggaagagggaagggaaggggaaaggggaagaaagggaaggggagggaaggggaaaggggaagaaagggaaggggagggaaggggaggggaaaggggagggaagggaaggggaagggaaaggggagggaagggaaggggaggggaaaggggagggaagggaaggggaggggaaagggaaggggaggggagggaaggggagggaaggggaagggaaaggggagggaaggggaggggagggaaagggagggaagagaagaggaggaaaggggaggggaaagaggagggaagggaaggggaggggaaagaggagagaaggggaggggaggggaagggaggggagggaaggagagggaaagggagggaaggggaagggaaaggggaaggaagggaaggaaaggggagggaatgggaggggagggaagaggagggaaggggaagggaaaggggaggaaagggaaggggaggggagaggtgagaaagggatgggagtgaagagggagagaaggggaggggaaggagaggaggggataggggaggggaggggaaagtggaggggaggggaaaggggagggaagtggaggggaagggggagggaaggggaagggaaaggggagagcaggggaaaaaggagggaaggagaaaggggagggaagggaagggaaggggagggaaggggatgggagggaaaggaaggagaggggagggaatgagagggtagggaagaggagggaaggggaagggaaaggggagggaagggaagggaaggggagggaagggaagagggagagaaggggaggggaaagggaagggaagaggggggaaggggaggggagaggaaaggggaaggaaagagaaaggggaggggaaggaaaggaaagggagggaagggaaagggaaggaaaggaaagggagggaagggaaagggaaggaaatggaggaagggggagggaagggaaagggaaggaaggggagggaagggaaagggagggaaggggaggagaagaaaggaaaagaaaacaaatcccatctcctcactctctgtcccgatgaggtggaaacaaaattctgtattctcagagcttgacgggctctgattcagcaccacccattttacacatgtggaagaggcacacagaaggaaaaggacttcctttctttactccaggacattcagaaagttcagtttcttagtgtctaggcccacgttttctccaatatatcttggcccttctctctctgcagtgatattttaatcaaactccaccaggcagagatccttggggtgtgtttgcccaattcattggcaaatatatattttttttctttaggacatcagcccttgtttttctacaccagttgaactcagagatgtcaaaaacataatcctcattctcagccaatataatttctttctttcttttcttttctttcttcttcttcttcttcttttttttttttttgttgttgttgttgttgttgagacagagtctccctctctcacccaggttggagtgcagtggtgtgatctcagctcactgcaacctccacctcctgggctcaagtcattctctggcctcagcctcccgagtagctgggattacaggtgtgcttcactatgcctggctaatttttatatttttagtagagactgggtttctccatgttggacaggctggtcttgaactcctgacctcaagtgatccgcccacctcggcctcccaaagtttggcctcccaaagtattggcctcccacagtgctgggtggcatgagccaccgtgcccggccatggccaatgtgattttgtttctgagttttcttcaactaaggcagggtttctcagccatggcattgctgacttctggggctgaatctttctctgggatggggttgtcatgcgttgctgggtgttgaacagcatccctggcctgcacccaccagatggcagtactgtccttgagcatccttgtccccattgtggcacctcaagatgtctccagaaaccgatatgtgtccgctgggtgagcactgctagactagacagacacttatgaccacactgtgatgcagtccccttccctacctaagagcgaagtgaatgtcacaggccagagtgtgaatctgtgcatctgagtctgcgaatctaatccttgctgtgcagctttgggcaagggaccaaatctctctgtgcctcagttgtcttatctgtgaagtggggggctcattagaggaccccatagctgaatacttggacacaggaactgagatcattgctgttgcctctgtgtggctgcaggcatcaccgccatggcatggggtgtggaggagaagctgctggtgattggcacccaggatggcatcatggctgtgtgggacatggaagagcagcatgtgatccacatgctaactggacacacaggtgagacttgggaagtgggctttgtggtcagcttccatagtgaaaagttggttctcagagccccttccccacagattcacttctctgtattgaaaccctggcctttgttcctgcatcacttagctatagttgcataatgaaccatccccaaacacagtagtttcaaacaagccatttctttttctttttaaatatgggatctcactgtattgcccaggctggagtgcagtggtgtgtttataactcactgcagcctcaaactcctgggccaagtgatcctcctgcctcagcctcctgagtagctgggactacaagcacataccactatacccagctaattttttaatgtttttagaaatggggtcttgctatgttgcccaggctggtctgaaactcttgggctcaagtgatcctccctccttagcctaccaagtagctgggattacaaatttgagccacaaacaagctatttctttagctcacttcctgtgcattggcaatgcaggctggacgcagctgggcagttttctgctctcagctgggcttgctcatgtatctgcagtcagtcagtggattatctaggagctggctgaatctgaatattttcaaatgaggcaactcaactttgctccacgtggtctgtcatcattcagcgtccttcaggtctctcatccccagcaaaggcaaggtttctttttttttttttttgagacggagtcttgctctgtcgcccaagctagagtgcagtggtgcaatctcggctcactgtaagctctgcctcccaggttcacgccattctcctgcctcagcctcccgagtagctgggactacaggcgcccgccaccatgcctggctaattttttatattttttagtagagacggggtttcaccgtgttagccaggatggtctcaatctcctgaccttgtgatccacccacctcgtcctcccaaagtgctgggattacaggcgtgagccaccgtgcccagccaaaggcagggtttcaagaaaacaagtaggcactcacagaatctcttaagcctggacttggagttggcacctggtcacattcacattctcttgaccaaaggaattcacaagagcagtccagtagggaaataggctaaataggctttctgccttcttttcttttctctttcctttcctttcctttctcttctctttccttttctttttctcattctttttttctgacagggtgttgctctgttgcccaagctggagtgcagtggcacaatctcagctcactgcactctcagcctcctgggctcaagcaatcctcccatctcagcctcttgagtagctgggactgcaggcacacaccaccacacctggctgatttttgtattttttggtagagacagggtctcactatgttgctgaggctggtctcaagctcctgagctcaagcaatcctctcgccttgtccttccaaagtgctgagattacaggtgtgagccactacacccagcctaggcttcattttttgatgggaggagctgcaaagtcacattgccaaggatgtggatcagtaagggtaaagaattgtggtcctttttgcatttgtcgacctcagatcctaagtaaggttgtttatttctacatagtcccttaacagatatggcttatttctgtaatcaattgttgagtgcctgctgagtaccaggtcctgttctagatgctgaagagagatagacgagggtcgggactaggatggaaaactattcattcttgaagactaatctcaagggtcctccctttgggagagatgattcccacagtagagttcataactagctaccttgtgctctcctgcagcttgatatacataggaccacattggctaagactacagttggctgggcgtggtggcttatcccagcactttaggaggctgaggcaggcagatcatttaagctcaggattttgagaccagcttgggcaacatggtgaacccacatctctacaaaaaatgcaaaaattagccaggcatggtggtgcacacctttagtcccagctacttgggaggctggggcatgagaatcgcttgagctcaggagattggggctacagtgagctgtgattacaccactgtactctagcctgtgcaacacagcgagaccctatctcaaaaaaaaaagcaagactacatttatttgttgacctgagatcttattactattgtttgagggcaagggttatgttttattcaacatactccatgcttatttgttgaataaataagttaaaatatcccatgtgtttaaaaaatacatttaacagaatcaagtcatcgaaaattagctttagaaagaatctaatctaggccaggtgcagtggctcacgcttgtaatctcagcactttgggaggcctaggcgggtggatcacaaggtcaggagatcgagaccatcctggctaacacggtgaaaccctgtctctactaaaaatacaaaaaaaattagctgggcgtgatggtgggtgcctgtagtcccagctactcgggaggctgaggcaggagaatggcatcaacccaggaggtggtgcttgcagtgagccgagattgcaccactgcactccagcctgggcgacagagtgagactctgtctcaaaaaaaaaaaaaagaaaaaaaaaaagaatctaatctaacccttttatgtaattaagaaaacaggttgggcattttatttaattaataaaacaggactcacacctgtaatcccagcactttgaagatgggaggatcacttgaggcccagaattcaagaccagcctgtgcaacatagcaagacgtcacctctaaaaaaaaaaaaaaaaaaaaaagtgttttaaattagccaggcatggtggtgtgcacctgaagtcccagctacgtgagaggctgagccaagaggattgcttgagtccaggagttggaggctgcagtgagccatgtttgcaccactgtattccatcctgggcgacagagtgagaccttgtttccaaaaaaccaaacaaacagaaaaatgggtgggggtggagaaggtctaaagagctgaatcaaatttctattagagatgacatattcaaatttttaaaaaatttaaaggggtgccctaaaaggctcaattgacaagatacataatattatgacacaatcttttgaaaaatcaaaagtttaattggccctccatatctgtgggttttgcatctatagattcaaccgactgtggattgaaaatatttggaaaagctggatgcagtggtgtgtgcctgtagtcccagctacaaggaggaggatgccttgagcccgggtgtttgagttcagcctgggcaacagagtgagatcctgtcttttggttgttgttggctgtgtttctttttctttcttccttttccttctttctttctttctttctttctctttctttttccatccttccttccttctttccttcctttccttccttccttcccttccttccccccttccccttcctcccttctttccttcctccctccctccctcctttctctctctctttctttctttccttctttctttcttttctttctttcttttttttttttcaggatctcactctgtcatccatgctggagcacaatggtgcaatcatagtacactacaatcttgacatcccaggttcaagcaatcctcccacctcagcctcctgaagagctaggagcacaggtgcatgccaccatgcccaactactttttaaaacagtttttgtagagactgggtctcaccgtgtttcccaggctggtcttgaattcctggtatcaagccatcctcccacctcagcctcctgaagtgctggaattacaggcataagccactgtacctgtctcttaaaaataaatttaaaggtggggaacggtggctcatgcctgtaatcccagcactttgggaggccgaggtgggtggatcacctgagatcaggagtttgagaccagcctggctaacatgatgaaactctgtctctactaaaaatacaaaattagccgggcgtggtgatatatacctgtaatcccagctactcgggaggctgaggcaggagaatcacttgaacccaggaggtggaggttgcagtgagccgagatcgcgccactgcactccagcctgggcaaaaagagcaaaactccatctcaaaaaataaaaataataaaataataaataaataaaataaaaataaaataataaaataaaaaataaataaaaataaaatttaagaccctgtctcttaaaacaaataaacaaataaatacaatttttacaaaggaaaatatttgggaaaaaaatagttaactgcatctggactaaacatggacagacctttattgtcattgtcccccaaacaatgcagtataacaactatttacatagcacgtatgccatattaggtattgtaagtaacctagagatgatttaaaatatacaggagtggccgggcacagtggatcacgtctgtaatcccaacacttcgggaggccgcggatcacctgaggtcaggagttcgaaaccagcctggccaatatggcgaaaccccatctctactaaaagtataaaaattagctgggcgtggtggtgcacacctgtagtcctagctacttgggagaccgaagcaggaagatcacttgaacctgggaggtggaggttgctgtgagccgagatcatgccactgcactccagccttggtgacagtgagactcagtcttaaaaagaaaaaaaaaaaaagaaaaattaagtatacaggagcacctgtagtcccaggctgcggctgaggcagaaggatcgcttgagcctgggagatcgaggctgcagtgggctgtgattgcattactatgctccagccggggtaacacagccagacccgtatctctaaaaataataataatggtaacaatagtaataaagtatacaggaggatatatataggctatatgcaaatacgacactatttcgtataaggcactggagcatctgtggattttggtatccgcaggggtgaaggaagggcaggggagaggaaagagcctcccaggcacagggagcagcaagtgcaaaggccctgagaggggaatgaggttggcgggtctacagaacagcaaggaaatcatgaggctggagctccagagattatgtcaaataaaaaggagcagtcggctgggcgcggtggctcacgcctgtaatcccagcactttgggaggccaaggtgggcagatcacgaggtcaagagatcgagaccatcctggccaacatggtgaacccctgtctctactaaaaatacaaaaattagccaggtgtgatggcacacacctgtagtcccagctactcaggaggctgaggcaagagaatcacttgaacccggggggcggaggttgcagtgagccgagatcgcgccactgcactccagcctgggcgatgacagagtgagactccgtctccaaaaaaaaaaacaacaaaacaacaacaaaaacagcagtcaccaggggccacatggtgtgcgactcccatggatatgaaatgtccagaacagactaatccacagagacaggagagacaagaggcagattagtggtggccaggggttaggggaggggagtggggagtgactgctgatggggacagggtctccttctggggggttgcgaatgttctggaactagatagagtgatggttgcacaacactgtgaatggctaaatgccactggattgtttgctttaaaattattaatgtgataggccaggcgcggtggctcacgcatgtaatcctagcagtttgggaggttgaggcgggcacatcatttgaggtcagaagttcgagaccagcctggacaacatggtgaaaccccatctctactaaacatacaaaattagttgggcatggtggcgcatgtctgtaatcccagctactcaggaggctgaggcaggagaatcgcttgaatcctggagtgggaggttgcagtgagccgagattgcgtcactgcactccagcctgggagacagagtgagactctgtctcaaaaaaataaaataaaataaaataaaataaacaaacaaaatttaaaaaattaacgtgataaagaaaaaagaggatgactgttttctgagattatgaaaatgttctgaacttatatatatatacacttatatatacatattttaatctatatttttgtgtatgtatatatttatgctttatgtatgtaaaacataatatatatgtgtgaataaaacataaatatatacatacatgaaagtatatatacatatatacaaaaacaaatatatacataaatatataaatatatactatatatatatttttatcaatgttttgccataaacattcttttgtgtccattgactcttttttttaaatttttttgtttttgagatagagtcccactctgtcgcccaggctggagtgcaatgacatgatcttggctccctgcaacctccgcctcccaggttcaagcaatcttcctgcctcagcctcccaagtagctgagattacaggcgcctgccaccacacccagctaatttttgtatttttagtagaaacaaggttttgccatgttggccaggctagtctcgaacccctgacctcaactgattcacccaccttggccttccaaagtgttgggtttacaggcgtgagccactgtgccagcctatttttattatttttacttttttttttagagacagggactcactatgttgcccggcttgtctcggactcctgggctcaagtgaccctcccacttcggcccctgaaagtgctgggattacaggtgtgagccacctggcccagtcatatccttgttctgttattgtattttatttcatttataatttccaccatcaatttcacagggtacatgtgcatgtctgctacatgggtatattgagtgatgctgagatttggggtacgaatgatcccatcactgaggtagtgagcatggtacccaagaggaattttgttagcccttgaccctcttcctccttccccattccagtagtccccagtatctgttgttcccatctttatgttggggacactttttttttttgagacagagtctcactctgttgcccaggctggagtgtagtggtccagtcttggctcactgcaacctctgcttcccaggttcaagcgagtttcctgcctcagcttcccgaggagctgggattacaggcgcacaccaccacacccagctaactttcgtatttttagtagagacggggttttgccttgttggccaggctggtctcgattcgaactcctgagctcaggcgatctgcccgcctcagcctcccaacgtgctgggattacaggcatgagccaccctgcccagcctgggattacttttataaggacagtaatcccattccccagagcgccatcctcataacctaatcacagcctgatgaactttttgtttattaagcagaatctccatttgtctgttatatgttgcaaatatttcctccacatctctcatgatgtgccttccaactgcagtttatcctcctgaagttttacatttctacataatccagttggtcagtttttcccctttatgccttccaaattgtacgttttgcttagcaaatagctctctaagattattatatttatttatttattttgagacaaggtcttgctgtgttgctgaggctggagtgcagaggagtgatcatagctcactccagcctcaacctcctgcgctcaaatgatcctcccacctcagcttcccgagtagctaggaccacaggtgcatgccaccccacctggctaattatttttttgcaagattataaaaatgatgagagaaatcctataatttttctagaagttgccccttttttacgtggttattaattttagacactcttagatgctgaatctttataaaactcaattatctgtttagtattcaacatctggggcaactgattgactcccaaccagttgtggccctctgaattttgctttgccacatttcattattttccatttggacaggttctatcaatttaaccaacagagagaggctctcaaaacaaaacaaaagtaaaaagaggctgggcacagtggctcacgcctgtaatcccagcactttggaaggccgaggcgggtggatcacctgaggtcaggagcttgagaccagcctggccaatgtggtgaaaccccatctctactaaaaatacaaaaattagccaggcgcggtggcacatgcctgtaatcccagctactcaggaagctgaggcatgagaattgcttgaacccatgagacacaggttgcagtgagccaagattatgccactgaactccagcctgggtgacagagcaagactccatctcaaaatagtaataataacaataataataataataataataataataatcatcatcatcatcatcatcatcatcatcatcatcatcataggccaggcgcggcggctcatgcctgtaatcccagcactgtgggaggccgaggtgggtagatcacctgaggtcaggagttcgagaccagcctggccaacatgatgaaactgtgtctctactaaaaatacaaaaaatttgccaagtgtggtggtgggcacctgtaatcccagctactcgagaggctgaaacaggagaattgcttgaacccgggaagtgaaggttgcaataagccagggccacgccactgcactccagcctgggcaacaagagcaaaacttcatctcaaaataataataataataataataataataataataataataataataataataaaaggccaggcatggtggctcatgcctgtaatcccagcacttgggaggctcaggtgggtggatcgcttgaggccaggagttcaaggccagcctcgccaacatagtcaaacccgtctccactaaaaatagaaaaaattagccaggcatggcggcaggtgcctgtaatcccagctacatgggaggctgaggcacgagaatcacttgaacccaggaggcagaggttgcagtgaaccaagattgagccactgcattccagcctgggtgacagagagagtccgtcaaaaaaaaaaaaaaaaaaagagggttacataattgttttgaaataattatccttgattacaaaaatcaataatgagggtgtggctggacaggaagttgctgggcagattgccttgcagatgtattttttctgtaaggttgcagtagcctttgtgcaaggttgtgatttttgtagttttttctgttattaggcatacaagcgtgagaactctttctccatagccttcctttatagcctgtttgccagggttttcttaatgttattgactccatttttattctgatgactttcacaattcaattccatccatcttttctttggtaaatgagggtatttccaagctgacaagcattttaatagttgcaaggccaaaatgttcccagctaatatactctcccctaccctggcctgctgcaggagaggtgaggtgtgtgaaaatatttgccaaagggaccctcgccaactctgcttcaaaggattacacgctgcacttgtggaacttactctctggccaggagaaatttaccatttgggatggaggctcaaaaaatcccgctgaacctcagatctggaaccttcatgtggatgaggcacacaaagttgtgtattcagcatctggctcaaaggtaacaaacatatgccctgtttgtaaaggaaagctgagaccagagcattcaaagacagaataggccatttctataaggagggctccctgatacagtgatggggtgggggtgtaaatggagtacacaaccacttgagagggtgctataagaggtttcagacttcatagttggattagacaatcctgataattctttctgaccccaagatttgaaacctttcatcttttttgaatatcagcattttagggctataaatttccctcaaagtactgctttacctacatcctgtaaattttgacgtgtgttttcatttacattcagtttaaaatactttcagatttcacttttgatttcttctttgatccatgggctatttaaaagtatactattagtttccagatatttgaggaatttctggatagggtcctgttctgtattttttttctaattaaattccattttgatgatgtaaaacctttcaaattcattgagacttcttttatagtctctctctctcctctctctctttttttttttttttttttgagatggagtcctgctctgtcgcccaggctggagtacagtggtacaatctcagctcactgcaacctccacctcccaggttgaagtgattctcctgcctcaggctcctgaatagctgggactacaggcgcacgccaccacgcccagctaatttttgtatttttagtagagacagggtttcaccatgttggccaggctggtctcaaactcttgacctcaggtgatccacctgccttggcctcccaaagtgctgggattacaggcctgagccatcatgcctagcttgttttatagtctctctaaatgatctgtgggcttctgaaaacaatgtctgttccactgtgttattccattacatcaatcataaccctgtgatttcatagttttataaatggagacacacaataacttcgtgggtgatagcttactaattgatgccaggaggaaaaaaaatctttatttaactaccagttgagtttcttgggaactcagtgaccttggttgtgtcattcaccattctgagtcttattgctgcctcttcctcataagatcatgagacatatcctggcatagtgcttagcacactgtaagcaccaaataattgatatctatttattattatgttacataagtaattggtggttgttgacagtaatatcagtgcatataaatcatgctgcccaaaataggagtcaccaaccagatgtacctattaaacacttgaaattcggggggtagggggtaaggggagggagagcattaggacaaatacctaatgcatgtggggcttaaaacctagatgacgggttgatagttgcagcaaaccaccatggcacatgtatacctatgtaacaaacctgcacgttcggcacatgtatcccaaaactgaaagtaacattaaaaaaaaataaataaataaataaataaataaataaataaaaacacttgaaatgtgactgtcccaacatgctgaaattcaaagacctagtatagtaaaaataatataaaccatctcaataataatttttgtattgattacatgttgaagtgataccacttggacatattaggttgaataaaatataatactaaaattgatttcacttgtttctttgtaccttttgtaaggtagctaatgagtttaaaatcacatgtgaggcctggcccacctctcctttttttctctgaattgggagtgttaaaaataaaatgcataggccgggtgcagtggctcacactcataatcccagcactttgagaggctgagcagggaggatagtttgagcccaggagctcaggagcagcctgggcaacatagtcagaccctgcctctacaaaaacaaatttaaaaatagccaggcatggtggtgcgtgtctgtggtcccagcttcttgggaggctgaggcaggaggattgcttgagcccaggaggtcgatgctgcagtgagccatgattgcaccactgcactccagcctgggtgaaaaagagaggctctgtctccaaaagaaaagaaaatgcataaagtatacaagagaaggcatcttgcatttgactccgggaaacttgtagtctaggtctcctgccaagatgctgcttcctcttcattattctattagatcaatgcttggaatctggaaactgcagagccggtattccatatcctgggagatgcctctgatccttggatgtgcatggccgtgctggcctcccaggccacactgctgacagtgtccagggatggtgtggtcagtctgtggagctcagctacgggaaaacttcaggggaagcaacatatgtccagcatcaaagaagaaacacctacctgtgccgtctcagtccagaagcaaggaaagcttgttaccgggtttagcaatggctccatctctttggtaagcacctttactgactatgatgtgaacattaactcagcttgaaagtgctcagatgtgctagaagttgggaaaaataatcttgccttgtatctttgttttgttttggagatgaagtttcacttttgttgcccaggctggagtgcaatggtgtaatctcagctcactgcaacctccgcctctcgggttcaagcgattctcactgcctcagccttccgagtagctgggattacaggcaagtgccaccacgcctggctaattttgtgtttttagtagagacagggtttctccatgttggtcaggctggtctcaaactcccaacctcagatgatctgcccacctcggcctcccagagtactgggattacaggcatgagccaccgtgcccggccacacgcttggcttcttaatcgtagggatttgcagttcagcacagttcaggaaacatctgttggcgtctcttggggactgaccaatgtgggcaattgttgaagctcagtccttcaggggatctctaagacatggtgtggaatgaggttgagagttgcgccacagagggactaggagttgggctctatccacctgccctgttggtggttggtggacggctgctttcatggacattaacatatagactggctgggcgctgtgtctcactcctgtaatcccagcactttgggaggctgagggggggtggatcatttgaggtcaggagttcgagaccagcctggccaacatggcaaaaccctgtctttactaaaagtacaaaaattgaccaggcacggtggctcacacctgtaatgccagcactttgggaggccggggcaggtggatcacctgaggttgggagttcgagaccagcctggccaacatgaagaaacctcatctctactaaaaaagcatacaaaaaattagccgggcgtggtggtgagcacctgtaatcccaactacttgggaggctgaggcaggagaattgcttgaacctaggaggtggaggatgcagtgagccaagattgcaccactgcactccagcctggacattaagagcaaaactccatctcagaacaaaacaaaaaacaacagcaacaaaaacaaaagcccaaaaattagccgggtgtggtggtgggtgcctgtgatccctgctactagggaggctgaggcaggagaatcacttgaacccgggaggtggaggttgcagtgagccgagatcatgccattgcactccagcctgggtgacagatcaaaactccatctcaaaaaaaaaaaaaaaaaaagaaaggaatcatggtggtgcatacttgtactcccagctacttgagaggctgatgtgggaggatcatttgagcttaggaggtggaggctgcagtgagccaagattgcaccactgcactccagcctgagtgacagagccaggccctgtctcaaaaaaattaaaaaataaaaaaaaaaagaaaagaaaagaagaagaagaatcatcccaaatcccaaagctccacatttctgaacctcatgacctgtggtcttcatgagttctcaaggtaccaaatacaacaacgaaagatactcccaaatccttggggttgtttttctttttctcaagcctctttgcagatattttgttttgttttttgagacagggtcttactttatctctcaggcgggagtgcagtggcacgatcatggctccctgcagcctcgacctcccgggctcaagacgtcctctcgcctcagcctcctgagtagctgggactacaggcgcatgcccccatgcctggctaattattattattattattttgtagaggtgggggtctcactatgttgcctaggctggtttcaaacttatgggctcattcagccttccaaagtgctgggattacaggcgtgacccactgtacctggccagaatttgttttttaccttttttttttaactgtttttttgttttttggtttttggttgtttttttttttgagactgagtcttgctctgtcgcccagactggaatgcagtggcgcaatctcggctcactgaaacctccacctcccagcttcaagcgattctcctgcctccgcctccccagtagctgggactacgggcatgtgccaccacgcccggctaatttttgtatttttagtagagatggggtttcaccatgttggccaggatagtctcaaactcctgacctcgagtgatccacccacttcggtctcccaaagtgctgggattacaagcatgagccgccacacctggccaacttttatgtttttaatttaaaaaattttttagagacagagtctcagtctgtcaccctggctgcaatgcagtggcacaatcatagctcactgcagcctccaactcctaggggcacaagtgatcctcctgcttgagcctcctgagtagctgggaccacaggggtgtaccaccatgcccagctaaaatttttattaagagatggagtcagctaggcatggtggctcacgcctgtaatcccagcactttgggaggccaaggtgggcggatcacctgagatcaagagtttgagaccagcttggcccacatggtgaaaccccatctctactaaaaatacaaaaattagccgggcatggtggcaggtgcctgtaatcccagctacttgggaggctgaggcaggggaattgcttgaacccgggaggcggaggttgcagtgagccaagatcataccaccgcactcctgcctgggagacagagtgagactccatctcaaaaacaaaaaaaataaaaattaaaaaattaaaaaattccagacttgtaacccttaacccgtggaagtgcctgacaggcatccctggttctgcacaggtttcctccaaaggggacagattgctggagaagcttccagatgctgtgaggttcctggtggtctctgaagatgagtccctcctcgccgcaggtagcgtttagctctcatttggagtagtgaggaagctaatcaggatcaggttggagaagggggtggggcttgggaacagagagaagtcctagggccagaggttagcaacgttttctgccaaatggcctcatagtaaacattttttgcagtccagacgagacaacctcagttgcaaagactcaactctgcagttgtggtacataaactagcatagacactatttttctattatttttcttttttttttaaatagggtcttgctgtgtcacccagactggagtggagtggctcaatcataattcattgcagccttgaatttctgggctcaaacgatcctcccacgtcagcttcctgaatagctgggattacaggcacacaccaccacacccagctaatttttgtatttttagtacagacggagtttcaccatgttggccaggctggtctcgaattcctgacctcaggtgattcgcccaccttagcctcccaaagtgctgggattacacaggcgtgagccattgcgcccagccctttctttccttttgatgcaggatttttcttggcctctttgccaagctgggagcagggggcaccccatttattcagcctgtggggtcacatctggcttttggcccagcccgcggctcccatggccactgccacgactgagcactcagcccctagcaggagggagcatgtgagcaagtgaatgtagggtccagctggctgcttcaagcactgacacagggccaggctccatgcagggcccatgggcagaccaggccatgtgtcaccccaaaggaaacacaaggggtccacgaccctgaagccccagagggggtgttacagtgtgctaattacctttttttttttttttttttgagaccgagtctcgctctattgcgtaggctgtagtgcagtggtatgatctcagctcactgcaacctccacctcccgggttcaagcgattctcctgcctcagtctcccaagtatctgggattacaggcacctgctaccacgtcccgctaatttttgtatttttagtagagatggggtttcatcatgttggccaggctggtcttgaactcctgacttcaggttatctgcctgcgtctgcctcccaaagtgctggaattacaaatatgagccaccacacctggcctaatttgctcttttagttccaccatctgcaacccaatggatggtggcatgttagcagttcagtcagcccctttccccattctggcctgcagttctgggactggcttggccccaccactgcttctattgcgtggagcagcttccctctgccatcaaggacagagggccacagtgtcacagccttcctgggtacctgcatccagtgagtcctaagctcttgtcccgtgtccaagaagaatgaggtcatgctgacaattgaaaagtgataaggacagagaattttattgagcaacaaaacagctctcaggggagaggggatgtgaaggttgggtcatctctctcagtgtggctgagtctgggcgtttttataggcacaggatgggggaggggcaggtggtaggtagtattggaaaacgtaacattcaattggttaaaaagcattattcaggccaggtgcagtggctcacgcctgtaattccagcactttgggaggccaaggtgggccatcacctgagatcagaagttcagatcagtgaacttctgatctgaacttctgatgatcatggtgaaaccctgtctctactaaaaatacaaaaattaactgggcatggtggcaggcgcctgtaatcccagctactcgggaggatgaggtgggagaattgcttaaacccaggaggtgaagattgcagtgagccaagatcatgccactgccacaaaagtcttattcagaaagaatcaatcaggaaagggtgggcaaacaggaacaggagttctcactctgggttgtggatttcatttggaaacagcagcccaggctgtttttggttcaaaggtacagtttcactggggacccattcctatctgcctaggcatttgcctgcctcctgccgctatcccttcctttctcccttcttactttctttcctcttcttccttccttcttccccttctcatttctctccttcctcccttcctctttacttttcttcctctctacctccttgactctcctctctccttcctcccttccttccatcatagttatcaaaggcctgctgtgtgcccagctttgtgctagtttctgagataccatgatgagccaaataggcagtccctgccctccaggaacttacagtttcattataataactttacaagtttccttaagatgagtgattactggctgggtacggtggctcaggcctgtaatcccagcacattggaagtccgaggtgggcggatcacttgagatcaggagtttgagaccagcttggccagcatggtgaaacctggtatctactaaaaaatacaaaatttagccaggcatggtggtcagcacctacaagcccagctactcaggaagctgaggcaggagaatcgcttgaacccaggaggcagaggttgcagtgagccaagatcatgccactgcactccagcctcagtgacagagcgagactccatctcaaaaaaaaaaaaaaattgatgagtgattacagaagtcaggccctcccccaaccagctgtgggctatgtgcagatggggacaggactgaatccaccttccccgtcctggatcccttctcctggcacctagcaggggttccaaaacatctcttttttttttttttttttttgagacagagtctggctctgttgcccaggctggagtgtagtggtgcaatctcagcttactgcagcctctgcctcctgggctcaagcaattctcctgcctcggcctcctgagtagctgggattacatgcatgtgccaccacacctggctaatttttgtatttttagtagagaataaaatacatgaaacatcggggttcaccatgttggccaggctgatctcgaactcctgacctcgagtgatctgcccgccttggcgtcccaaagtgctgggattacaggcatgaaccaccacatccggcctccaaaacacctctgttgatggaaggaatgaccctcaatctcctctggacatgagaggtgtaaccccagttcctgccgtttcaggctttggaagatcggtgcggatattcttggcggactcgaggggctttcgccgattcatggccatggatctggaacatgaagacatggtggagacggctgtttttggtactgagaacaacctgatcatcacggggtcccttgatgcgctcattcaggtgaggggagatctgggacccttcatcctcacctccacctcgggaacagacactgattctttagggatttttggctgcaaaatacagacacccacaaaaatgagtgcaggcaaaataggtgagttcattgggaggatatgggggtgtatcctccgccccagtggcagacctgggtgagaattactgaaatgttcaacaaaggaggtagcattcccaaactgatcctcaaaccttgggggcagatttgtgccttcagagtggagcagggttgtgggggaggaaaattctcaatttaagttcaaagttgtccaagctggagagaaaagtagatggtgaaatagcagatcttcagtgttttagtctcaggcctcttgaagttctctttttttccccctccttcttatgagctattttttccagttttaaagaaattgataaatagactgtgcacagtggctcatgcctgtaatcccagcactttggaaggccaaggcaggtggatcacttgggcccaggagttcgagaccagcctgggcaacatagcaagacccaatctctacaaaaaaacacaaaaattagccgggcgtcatggcatgtgcctgtagtcctagctactcaggaatctgaggtgggaggatcacatgagcctgggaggtagaggctgcagtgagctgtgattacgccactgcacttcagcctgggtgacaaaacaagaacctgtctccaaaaaaataagaataattttctttattttttgagaccaagtctcactcagtcgcccaggctggagggcagtgtggcatgatctcagctcactgcaacctcgacctcctgggttcaagcaattctcctgcctcagcctcgcaagtagctgggatttcaggcacccaccaccatgcctggttaatttttgtatttttagtagagacggggttccgccatgttggccaggctggtctcaaactcctgacctcaggtgatcagctgccttggcctcccaaagtgctgggattacaggcgtgagccaccatgtctggctagaataaaataattaaaaaaaaaaaaacattaaaagttttgagcttccagaccctctaaaaaaggtttacagggcaccctctaaaaaaggtttacagggcaccctccaggagttccctggaacacactttgggaactgctctggaagctgatgggttcaagcctgagtaagttaaaggaatgggaagatgtgaaggcccttgaacttacagcctgaaaattcaccttaggtttatgaatgggctgaagtgtatttcttattttcttatttatttatttttatttttattttgacggagtctcactctgttgccagcctgaagtgcagtggcgcaatctcagctcactgcaatctctgcctcccaggttcaagtgagtctcctgcctcagcctcccgagtaactgcgattacaggtgtgcaccaccacgcttggctgatttttgtatttttagtagagatggggtttcaccatgttggccaggatggtcttgatctcctgacctcatgatccacccgcctcagccttccaaagtgctgggattacaggtgtgagccactgcacctggcctatttatttatttttatttttattttttttgagacggagtttcattcttgttgcccaggcttgcgtgcaatggcacgatcttggctcattgcaaactccacctcccgggttcaagcgattctcctgcctcagcctcctgagtagctgggattacaggcatgcaccaccaagcctggctaattttttgtatttttattagagatggggtttctccatgttggtcaggctggtctcgaactcctgacctcaggtgatccacctgcctcagcctcccaaagtgttgggattacaggcgtgagccaccgcgcctggcccaatgggctgaagcgtatttctgaactatagttgtccacagaagatgtcagatctgccctcctgttctgcttcctcaggtgtggagtctgtcagaacaggggacccttctggacatcctggaaggcgtcggggcccccgtgagcctgctggcccgcggcggggctttggtggcatctgcttccccacagtcctcatctttcaaggtctgggatctcagcgatgctcataggtcccgggtgcctgcaccatttctggaccgcaccggcctcaccgcagtgtcccacaatggaagctacgtctacttccccaaaattggggacaaaaacaaagtcactatttgggacttggcagaaggttggtaaggtataagtatggtcatttttgtgggtaaggcttggagccatctgtcttagtttaggctactgtaacaaatcatccccacaggctgggccccatggctcacgcctgtaatcccaggactttgggaggccttggcgggtggatcacctgaggtcaggagttcaagaccagcctggccaacatggcaaaaccctgtctctactaaaaatacaaaagttagccgggcatggtggcacatgcctgtatccccagctacttgcgaggctgaggcagaattgtttgaacctgggaggcgaagactgcagtgagccgggatcctgactctgcactccggcctgggcgacagagtgagactctgtcccagaaaaataaaataaaataaattatccccatagactgggtggcataagcaagaaacattattcctcaacattctggaggctgggaagttccagatcaaagtgcaagcagatctcgtgtctggtgaggacccgtttcctggttcacagatggccatcttcttgatgtgtccccagagagagagagaaatctcttgtgtctcttcttataagggcactaatcctattcaggaacgccccacattcatgatctaatcacttccctgtcactctgctacagttcggaggtttggccctacaaaccagatgttggcatttaatatccggctggccatggtggcttaaacctataatcacagcactctgggaggccgaggcagtaggattgtttgagcttagggttcaagaacacctgggcaagatgagaggatgccatttctactaaaaatttaaaaaatagctggatgtggccagtcatggtgggtcacacctctaataccagcactttgggaggccaaggcaggcagatcacttgaggtcgggagttcgagaccagcctgaccaacatggaaaaaccccacctccactaaagcaatacaaaattagctgggcgtggtggtgcatgcctgtaatcccagctactcaggaggctgaggcagaagaatagcttgaacctgggaggcagaggttgcagtgagccgagatcacgccattgcactccagcctgggcaacaagagcaaaactctgtctcaaaaaaaaaattagctggatatggtggcatgtgcttgttgttctagctattttgggggctaaggtgggaggatcgcttgagcctgggaagttgaggctacagtgagtcatgatcgcactactgcactccagcctgggtgacagagtgagaccctgtctctaaaaacaaacaaaaaagccaggcgtgatggctcacacctgtgatcccagcactttgggtggctgaggtgggcggatcacttgagctcaggagtttgagaccagacgtctctacataaaagacaaaaattagctcggtgtagtggctcacatctgtagtccaagctacttgggaggctgtggtggtaggatcacttgagcccaggaggcagaagttgcagtgagctgagattgtgccactgcactccagcctggacgacagaacaagaccctgtttgaaaacaaaacaacaataaaaaaagaaatttaatccccagtgttggagggaggcctcacgggaggtgtttgagtcataaggacacatccctcgtggatagattaatgccctctcctggcaaggcagtggtggtggtgagtaagttctaactctgttagttctcgcgaggttgttaaaaagaacctgaccccagctactcaggaggcagaaacaggaagattgcttgaggccgggagttcaagaccagcctgggcaacatggaccttgtcgcaataaaaataaaaataatggccgggcatggtggctcacgcctgtagtcccagcactttgggaggctgagttgggtggatcacgaggtcaggagctcaagactagcctggccaacatggtgaaaccccatctctactaaaaatacaaaaattagccggacgtggtggcgggcacctgtaatcccagctgttcaggagggaggcaggagaatcgcttgagcccggcaggcagaggttgcattgagcaccattgcactccagcctgggtgacagagcaagactctgtctcaaaaataaataaataaataaaaataaaaataaaaataatgagctgggcatggtgatattcacctgtagtctcagctacttgagagatggaggcaggatgatcgcttgagcccaggaatttgaggctgcagtgaactgtgattgcaccactgcactccagcctaggtgacagagcaagaccctatctcaattaaaaaaaaaaaaaaaaaaaaaaggaagctagcacttccctctctcttgcttcctctggccgtatgacctctgcacaccccaacccccttcaccttttgtattaagaagaagcagcctggggccctcaccagaagcagaagctggcaccatgcttcctgtacagcctgcagaacaatgagccacataaacctcttattcataattatgcattactgtattagtctgttctcacactgctaataaagacatacctgaggccgggcctgctggctcacacctgtaatcccagcactttgggaggccaaggcaggcgcatcatttgaggtcaggtgttcgagactagcctggccaacatggtaaaaccctgtctctactaaaattccaaaacttagccagaaatcgcttgaacccaggaggtggcaattgcagtgagccaagatcttgctactgcactccagcctgggcaagagtcagactctgtctcaaaaaaaaaaaaaaaaaagacatacctgagactgggtaatttgtaaaggaaagaggtttaatggactcacatttgcacatggctgggaaggcctcacaatcatggcagaaggcaaatgaggagcaaagtcacgtcttacatggtggcaggcaagagagtgtgtgcaggggaattgccctttacaaaaccatcagatctcatgagacttattcgctaccacaagaacagtatgggggagactgcctccatgattcaattatctccagctggcctcggccttgacctgtgggaattattgcaattcaaaatgagatttgggtggggacacagccaaaccatctcagttacccagcctcaggtagtccttcatagcaacaccaacagacttagacaggccccagctcctaataccatcctatggggagtgaggattttgacataggaatttggtgggggggtggggacacaaatcttcagtccataacattcctataacttcaatcaggtagaaagtagctagtcaaaaacaggttttcattagcaacaccaatgaactaagacaggcccaagctcctgataccattccacagagggtgatgattttaacataggaatttgtcagggggacacaaatcttcagtccataacacgcctataacttcaatcaggtggaaactagctagtcatggccaggtgtggtggctcacacctgtaatcccagaactttgggaggctgaggtgggcggatcatttgaggtcaggagttggagaccagcctggccaacatggcgaaaccccaactctacttaaaaaaaaaaaaaaaaaaaattatctgggcgtggtggtgtgtgcctgtaatcccagctactggggaggctgaggcaggataattgcttgaacctgggaggtggaggctgcagtgagccaagaccatgccactgcactccagctttggcaacagagtgagactccaccacccgaaaaaaaaaagaaaaagaaagtagctggtcaaaaacaggatttcattttatacattttctgcatgaggtagttggcaatctggttgtttccgtttggcctgttttaattcaggttacctagaagctgaatctgtgatgaggatatttgcacaagtgatgtattgaggggtgtttccaggagaaccccagagggagatgagaaaatggggctggcgggggaaagggttgagcaagaatgcaggctcagctaaagtccctctcagcatcattccatggggagccctggaagaggtagagcaccagtcttagtcaattccggccactataacagaatgccatggattgggtggcttagaaagaatagcaaatggggccaggtgtggtggctcatgcctgtaatcccagcactttaggaggctgaggagagaggatcacttgaggccagaagttcgagaccagaagtttgagaccagcctgggcaacatagtgagaccccacctctacaaaaaaatttaaaaggtatcgggcttggtggtacatgcctgtagtcctagttactccagagtctgaggcaggaggattgcttgagccgtggagttcaaggctgcagtgagctatgataatgccactgcactccagcctgggcaacagagaccctgtctctctgtttttttttttaatttaaagaaagaatagaaatttgtttatcatatttctggaggaggctggggagtccaagatcaaggtgccagcaactttgttgtcttgggttaaattaatttttttttaaatttggtatctggtgagtgtcctctttctgggtcatggatggccagattttctttgtcctcacatggtagaaaggggcaaagaagctccctggggcctcttttttttgttgttctgtcttatttaagagtcagggctcactctactgtctaggctggagtgaagaggtacaatgacggctcagtgcagcctcgaactcctgggctcaagcgatcttcctgcctcagcctcctgagtagctggaaccacaggtgcaccaccatgcctgactcctggagactttaaaatttttaaaaatatttatttatttatttatttttatttttattttattttatttttgttgttgttcttttgtttgagatggagtctcgctctgtcacccaggctggagtgcagtggcgtgatctcagttcactgcaacctccgcctcccgggttcaagcaattctcctgcctcagcctcccgagtagctgagattacaggtgtgcagcacaatgcctggcttatttttgtatttttagtagagatggggtttcaccgtgttggccaggctagtctcgaactcctgacctcaagtgatccacctgcctcggcctcccaaagtgctaggattacaggtgtgcaccactgtgcccagccaaattttgtgtgttttgtagagataaggtctctctatcttgcccagggtggtcttgacctcctgggctcaagcaatctgcctgcctcagcctcccaaagtgctgggattagaggcgcacaccaccatacctggttaatttttttaatgtttttgcagaggcaggggtctcactcttttgcccagactggtcttgaactcctggtctcaagccatcctctcacttcagcctcctgaatagatgggattacaggcatgagccactgcacctggcatctctccatttccttgggccctggttcaccctgcaaccagcaaacaagcacctcgagaattgtaacctcacttgatttgctccctgccaacccccagagctttgcctagtgggctgttactctaaaaatgtttgccaaattaacgactgaatgaagttgagaatcagcttgaaaatcaggattcctttctcctattatttcatcattaacaaggagtttcttttttctttttctttcttttcttcttttttttttgagagggagtttccatctgttgcccgggctggagtgcagtggcgtaatcttgacacactgcaacctccacctcctgggttcaagcgattctcctgcctcagcctcccttccaagtagctgggattacaggtgcctgccaccacgcctggttaatttttgtatttttggtagagacagggttttgccatgttggccagactggtctcaaactcctgacctcaggtgatccatccacctcggcctcccaaagtgcttggattacagacgtgagtcaccacgccctgccattaacaggagtttctatacctctatcctcccagcaggactgtgccaagtactgttggtgagaaactcagaaatccctcactgtccaattctcgcagacccagcagtgcccccaccttcattttactcctgggaattgcccactgatgaaagaagcctctcaactggaaatggcagggggatgtggccaccgcccctgaaatggccccagtcaatgactgcctgatgtgggaatacaaaagtctggcccccttgcttcaagatgggacaattcatggtggctcatgcctgtaatcccagtactttgggaggcaaaggtgggaggatcgtttgagccctggagttcaagaatagcctgggcaacatggtaaaatcccatctctacaaaaattagctgggcgtggtggcccgagcctgtagtcccagttacttggggggctgaggtgggaaaatcactagagcctgagaggttgaggctgcagtgagccatgttcgtgccactgcactccagcccgggcaacagagtgagactccgtctcttaataaataaatacataaataggctgggcgcgatggctcatgcctgtaatcccagcattttgggaggccgaggcgggcggatcacttgaggtcaggagttcaagaccagcctggccaatatagcgaaaccccgtctctactaaaaatacaaacaaattagctgggcgtggtggtgcgcacctctagtcccagctacccgggagactgaggtgggagaattgctggaatctgggaggcagaggttacagtgagccgagattgtgccactgcgctccagcctggacaacgaagccagactctgtctaaaaaaaacaaaaaataaaaaaattagtagggcacagtggcaggcgcctgtagtctcagctactcaggaggctgaggcaggagaatcacttgagtccaaaagttggaggctgcagtgagcttcagtctcgccactgcactccagaatactgtctcaaaaaaaaaaaaaaaaagaaagaaagaaaatatgaacaccaggccgggtgtggtggctcacgcctgtaatcccagcactttgggaggccaaggtgggtggatcacctgaggttgggagttagagaccagcctggccaacatggagaaaccccacctttactaaaaatacaaaattagctgggcgtggtggcacacacttgtaatcccagctactcgggaggctgcggcaggaggattgcttgaatccaggaggtggaggttacggtgacctgagatcgtgctattgcactacagcctgggcaacagagtgagactccatctcaaaaacaaaacaaaacaaaaaaaaccaccagggaagcagggctgctgtgattcactctcagtgtaagtcattctcatttttcttccctggcaggcgaggaacaagattccctggacacctccagtgagatcaggtgtctggaggttgctgagcagcgcaagctcctatttacgggcctcgtgtcgggggtcgtccttgtgttccccctgaattccaggcaggacgtgatatgcattccccctcccgaggcccggaaagcaatcaactgcatgtccctgagcaagtgcgaggaccgcctggccatcgcctatgacaacatcgtcctggtgctggacatcacctccggggacccctgcccggtcatcgatgggccaagatacaccttttacactcagctgcccgagaccctctccagcgtggccattctgacggactaccgcgtggtctacagcatgaccaatggggacctctttctttacgagtgtgcaacttccaaagcgtttcccttggagacccacaggagccgagttgcctgtgtggaggtcagccacaaggagcagctggtggtcagcgggtctgaggatgccctgctgtgtctctgggacctgcaggcacgcaagtggaaattcgagatgagctacacggtgggtggcccgcctccccatgttcatgctagacccaggcattggaaaactgatagatagccatcatttactaagcacacaccatgggccatcgaccaggatgggactggggtgatgaaaatgaggcacttggtcaggcgcagtggctcacgcctgtaatcccagtacttttggaggctgaggcaggcggatcacctgagatcgggagttcaagaccagcctggccaacatggtgaaaccccgtctctactaaaaatacaaaaattagccaggtgtggtgttgcatgcttgtaatctcagctacttggggggctgaggcaggagaatcgcttgaaattgggaggcagaggttgcagtgagccaagatcacgccactgcactccagcctgactacagacactccgtttaaaaaaaaaagaaaagaaaagaaaagaaaagtgaggcatttgtctcagaagcaaagttttttttgttttcattttttttttaaagagacagggaccccactgtcacgaggctgtagtacagtggcacaatcatagctcattgcagcctcaatctcctgggctccagtgatcctcccgcctcagcctcccaaagcactgggatttcaggcatgacccaccggacctggctacaaagttcaaaggagtaccaaaaagctcagcaatggtaggccaggtgcagtggctcacccggcactttgggaggcccaggaaggaggatcacttgaggccaggagctggagaccagcctgggcaacatagggagaccttatctctacaaacaaatgcaaaaattagctgggcatggtgatgtgcacctgtgatccagctacttggagggctgaggcggaaggattgattgagcccggatgccactgctctctagcctgggtgatagagcaaggcctgtctcaagaaaacaaaaaacaaaaactcagcaatgaagataaataattttttttttttgagatggagtcttgctctgtcacccaggctggaatgcagtggcgccatctcagctcactgcagcctcccgggttcaagcaactctcccgcctcggcctcccaagtagctgggattacagataagcaccaccatgcccagctaatttttgtgtttttagtagagaaggggttttgccatgttgtccaggctgaactcctggcctcaagtgacctgccttggcctcccaaagtgctgggattacaggtttgagccactgcacctggccaagaagtaatattttaatgcaatatttttaaaaatctaaaatgaataccaaaattccatgaagaacaaaatctcaacattataggtaaaaactggatcaaatcctgcactggcttagtgctgcttcactctcttcaccctaatcctggctctgtgctatttctttttttttttctttttctttttctttttttttttttgagatggagtcttgctctgtcacccaggctggagtgcagtggtgcgatctcggctcactacaagctctgcctcccgggtttatgccattctcctgcctcagcctcccgagtagctgggactacaggtgcccgccaccacgcctggctaatttttttgtatttttttggtagagatggggtttcaccgtgttagccaggatggtctcaatctcctgacctcgtgatccgcccaccttggcctcacaaagtgctgggattacagtcatgagccaccgtgcctggctgctccgtgctatttctttatccaactgatacttattgaaaaacctctgccaggacccctttctatcacaagggttgcttttctatcacccctttctatctgcctggtcacagggagactctatcccatgtcttggagccactttgtagttgggaagacacagtgagctctgtctgggcaaaaggatttttttgtgtgtgtgttttgctcactgaagtttcccttgttcctaggagaactcctgacatttccttgatgctcaataaatggcaagggctgctgcttaagaaagccatgtaaggctgggcaccatggctcacacctgtaatcccagcactttgggaggctgaggcgggtggatcacctgaggttaggggttcgagaccagcctagccaacatggtgaaaccctgtctctactaaaaatacaaaaattagccctgcatggtggtatgtgcctgtaatcccggctacccgggaggccgaggcaggagaatcactggaacctggaaggcagaggctgcagtgagccgagaacacgccactacactccagcctgggcgacagagtgagactccatctcaaaaaaaaaaaaaaaaaaaagaaagaaaaagaaggccttgtaagtctagattaggcacagcaactcatgcctgtaatcccagcactttgggaggccgaggcagggggattgcttgagctcaggatttcaagaccagcctcagcaacacagcaagatcccatctctagaaaaaaaaattagccaggtgtggaggtgtgtgcctgtagtcccagctagttaggaggctgaggtgggaggatcgattgagccctggagttcgaggctgtagtgagctatgatctcgccactgcactccaccctggatgacgatacaagattctgtctctcgagcaaaactaactaataaacaaaaatgaagaaattaacatgtgaacagtactattaattaaactgtcaaccttatgggaattttttattttttgttatttattcatttatttatttttgaggcagggtcttactctgtgagccaggctgtagtgcagtggtgcaatcatagttcactgtagcctccgcctcctgggttcaggtgattcttccacctcagcctcctaagtagctgggactacaggcatgtgccactgcacctggctaattttttaattttttgtagagacagggtttcacccacccaccttggcttcccaaagtgctgggattacaggtgtgagctatcacatccagcctttattggaatcttaccagcttttcaattcattccttttttccattctagaatccaatccaggattccatgtgagattagcacatagcttttaattaaatacaatcatagctaacatccgtataaccaaagtaatttaagaaattgaatccccatcgaaaaaagaaattgaatcctatggccaggcacagtggctcatgcctgtaatcctagcactttgggaggctgaggcgggtggatcacttgaggtcaggagttcgagaccagcctgaccaacatggtgaaacctcatctctcataaaaatacaaaaattagccgggcatggtggtgcatgcctgtaatcccagctacttgggaggttgaggcaagagaatcgcttgaacccaggagatggaggttgcagtgagccaagatcgtgatattgcacttcagccagggcaacaagagcgagactctgtctcagaaaaaaaaaaaaaagaaagaaagaaagaaaaaagaaaagaaaagaaaaaagaaattgagtcctacaattgttcctttcagtgcaaaatgtatctaaacctttctatccaatctctatggaggtgtgcctgggttggggtagtatctgtgctgctcatctctccaggttttcattggatccatccccctgtggggcgcttcaaagcctggttctgaggtcaggagtttgggaccagcctggccaacatgatgaaaccccttctctactaaaaacacaaaaattagttgggcatggtggcaggagcttgtagtcccagctacctggaaggctgaggcagaggaatcgcttaaacccaggagacggaggttgcagtgagccgagatcaggctactgcacctcagcctcaggaacagagcgagattccatcaaaaacaaaaacaaaaaacaggcatagtggctcatgcctgtaatctcagcacttcgggaagccgaggcaggcagatcacttgaggtcagttcaccaccagcctgggcaacatggtgaaaccctgtctctactaaaaatacaaaaattagccaggtgtggtggcacacacttgtaatccctgctacttgagaggttgaggcaggaggatagcttgaaaccaggaggtggaggttgcagtcaagccgagatggcatcactgcactccagcctgggtcagacctgttaaaaaaaaacaaaaacaaaaaaaaggcctggttccttggggctggtttcctgggtgtctttcagtttggaatcaagatcatattgtctgggtcaggcacgttggctcacacctgtaatcccagcactttgcgagaccaaggctagtggatcacctgaggtgaggagttggagaccagcctggccaacatggtgaaaccccatttctactcaaaatacaaaaattagccaggcatggtggctcatgcctgtaatcctagctacttgggaggctgaggcaggagaatcgcttgaacctgggaggtggaggttgcagtgagctgagatcacaccactgcactccagcctgggcaacaagagtgaaactccatctcaaaaacaaacaaacaaacaaacaaacaaacaaaaaacccaagaaaaagagagatcatattgtctgttttcaacagagttcttactgcagaggggtccaatgtgcttgcttctccaaggatgacaagtatgtgtacgtgggcttaaaggatcgctctatacttgtttggagtgtgctggatggtgagtcattttgcttttagggcaggattgagcttcgatctggagagaaaaggctctgacctgggtcctgggcattagagggccctgctctggccacctctagctgcatcccttagcttttaggaaggtgtctgcaggcaaaggcaaagggcccacaatccctcttctagacccatgctctggagttcgagaactccctcccttgagttttcattagggcatgcacaggcttcctgcatacagccatccttccgaggatagactgggctcctggtgtgtgcacttctgggctcaggagtagccatggggtggtatggatggagtttgggtgtctgagttggttgtgagatggagctgagaagagtgagaagagggtcaagtcactagtagtggggggctggttacatcactacattccagcatagaaccctgaggagcccaagaattctcaatctgtttccaggtgtttgtgaaggttccttcatcaatataagaggacacagcatattctatttaatagtttattccctagaattgcaatgtttatatatggtgtcttcttggatgtgggtcttatttcattctttgcccccgccttatagatgttagaagcagcctgtttttgttttttgttttttgtttttgagatggagtctagctctgtcacccaggctggagtgcagtggtgcaatctcagctcactgcagtctctgcctcccaggttcaagtgattctcctgcctcagcctcctgagtagctgggattacgggcgcccaccaccacactcagctaatttttgtattttgagtagaggtagggtttcaccatgttggccaggctggtcttgaactcctgaccttgggtgatccacccacctcggcctcccaaagtgctgggattagagatgtgagccaccattcctggccagaagcagcctgttttaagaccaaccactttggaaacaccgtgtctcttggtctgttcagtattatgctaaggtcttagcaagagttaacactggctgggtgcagtggctcaagcctgcaatcccagcactttgggaggccgatgtaggaggactgcttgaggccaggagttcaagactagtctggacaacatagcgagactctgtctctacaaaaaaaaaaaaattaaaaattatccaggcatggtggtacatgcttgtagtcccagctactcaggaggataaagtgatcatgggaggtcgaggtgtgggagattgaggctgcagtgagccatgatagcaccattgcactccagcctgggcaacagagtgagaccctgtcaaaaaaaatgagttaacattttttgtatactgggtactgtccttaagtcatttaactctctcaacactcactcccatttacagagcaaaaactgaggctctgagaggctggcagacttgcctaaggtcacacagtgagtaactagtaggcttaggtttgaggctgaccttcctgatttcagtacgcctttgtcactttcttacactgtctcctatagaaaaggcgctcattgtgtattatctctttgaacccttatgacactagtaggagataagtatcattgctatccttgtttgacaatgaagaagctgaggatcagagaggttaggagacttgcccaaggtcacaaaacaagtaagtggctgaataaatatcaggtggagcctactacattgtagttgaatacactgtaatctgatacatagtaaactataacactattatacattgtagtataatatgctgtagcaaagatatatacaactggtataaagttacagatggctcagaagatgaaggttgaggactgtggccttaaaagcccatcctgggccagttcacaacctctcttccttctcctccttcaacaataatatttactgagctcactctgggccaaaaacctacactaagcacatgacctgcatgatgcctttcaatcttaaaaatcgccctgagcaggtgtaggttctgttatcattcccattgtgcagataaaggaagagggactctttggcataataaatgtcatgccaaaattagtagagggcatagcaggaattttattccatgcagccaactctggaatgtgtaggattggacctctacaccccatttttctcatttgtgtccttctcttcacccttacaggcaccctgctgacagtccagtttgtccatgctgtggtaaacagaatcatcccaaccaccagtggcttcattgcccccaccaggcatggttatctgatccgagagaatttccagtgcctttcagcaaaagcctcaccgcaggaccctcttaagaacttcaagaaggcaatgtggatggtcaaatccaggcagagagaggagctagttgcagctgcaggagctccccaggacttggagtcagaaagtgcccagggaaatgaaaccaaatcaaacaaatgctcacaagtgtgcctgatagtgtaaaaaaataaaaataaaaaaaccctgtgggggtatggggctccagtgagttagccccatttaatctagttaaagcaaaaagaatacgtttgctggtgtatatctggacccatggcttcagattatggcttcagaccttgtctcttctcatctttccattattctttcctctttttcattttcattctcagacttgccacccccaggttagcaacatggtggccaatatgctgctgtctccaatttcaatagaaaagagagcttctctttcccaacagtcctagcctcaactctactggtcccaattggcccatacgcctagccctaaaccaattattatatctgggagaatgcagagctctaatcggctagactgatccaatgtccaccactgggactgagaatagaagagattactcctgagatgcaaactggagttctggtaccagatgaagggggaacggatgaatgtgagatacagcaaatcactgatgtggaccacagaacctcacagtttataaagctgtaggtgctgtcatctgatcctcatcacaactcatactttagggagggcaggagtttctgtatctattttacagatgaggaaactgagccttgcggaagtagttataatttgattcaggtcacaagtccaaggtgcaagagctctgagagtgagccttctgtcccattcctgttagacctcactccaatttcagtctgcagagcacaaccatctcttccacaggcaccacactcaaatgctcacaggagctagtgactaatctagacacttccatgcacctgggtgagcagcagggagagacagagactggacatgtggaaggcagagattgtgtctagggtgggtatgagcagcctgactgtagcccagaatcaccatggccaaacaagcccactgctgtcagtgcttccagttgtaataagcaaagccagaaatccagacttttatgcaaaaatgttctgacttttaaagttggcgattggttgaatttatatctatagtgcatttggcatgtgcgtctttggttaatgagctgacttcaggactcacgctggcagtaaaacaatcaacatgttatagttcatccctctctattccttggctcccaaacttttgggataaagatgtgggtttttaatcttaaaaactggaggctcttggaagtagaaagagctgctgatctctccctgctttgcttttgaactgtctgccttgtgcaagttcaacagtcaaactgttttcattccacttaagtggatctttcttctttgcccacagccttctaaaagcccttctcagtcttctcaggcttttactttaatgctaggatagtctaaatcttcaaggtggctatcccttctcccctccgtggaattcctgatagagtctcaataaaagcaaccttagaaacagaggcttttgagctgaacaagaccctactgctgtcttattcatccattttccaaaccagttttccaaggcaggttttggtagttctgcaaatgttagtgtcaaatttcatttaaaaatattttaaactgtaattttaagatgtatgcttggatgtattgggcagcagcttctaaggtgttgaagattactaaggttggtgcaaaaagtaactgtggttttcgccattaaaaatattaaaaataatggcaaaaactggctgggcacagtggctcacacctgtggtcccagctctttggaaggccgaggcaggtggatcacctgaggtcaggagtttgagaccagcctggacaacatggtgaaacccttctctactaaaaatacaaaaatcagccaggcatggtggtgagtgcctgtaatctcagttactcaggaggctgagtcaggagaatcacttgaacccgggaggcggaggttgcagtgagctgagattgtgccactgcactccagcctgggtgacagagcaagactccatctcataataataataataatggcaaaagcctcggtggctcacgcctgtaatcccagcactttgggaggctgaggcgggtggatcacttgaggccaggtgttcaagagcagcctggtcaacatggtgaaactctgtctctactcaaaaatacaaaaattagcctggtgtggtgacgtacacctgtaattccagctacttgggaggctgaggcaggagaatggcttgaacccgggaggcggaggttgcagtgagccgagatcgcaccactgcactccagcatgagtgacagagactctgtctccaaaaaaaaaaaaaaaaaaaagtaatggcaaaaaccacaattaattttgcatcaacctaataatttaggattcttctgccattttcatttaactgatttaactgaagagcccaattaaattgtgaagggagccctgaaaaaattagctactctttgccactgcttctctgtgaatcaagggcttacccaatgcagaaataaagtagatgttgagaccaattaagatttcacctacaaattctgattttaaatgcctgtgtccatctccacagcctcagtgagaattgattgttttgtagataaatcctaatttaaacattggaaatgcctttttactaataaaatgctacaacaaattattgcttatattgggagtttttgcagtgtttattcatttgaaaaagagtttggttgctaagaaagtttgacagttggctggtcaatgcttgtaatcccagcactttgaaaggccaaggtagaaggatcacttgagcccaggagtttgagaccctgtctctccaaaaaaaaaaaaaaaaatttttttttaattagctgggcatggtggtgcacacctgcagtcctagctactcagggggccaaggtgggaggatcacttgagcccaggagatcaaggctgtagttagctatgatcgcaccactgcactctagcctgggcaagagagtgagaccatgtctcagaaaaaaaataaaataaaattaagggatgccgaaaagctcagcaatcatgacaaataatgttttctctctcttttttttcttgttttcttttcttttggaagacaaataatattttgttatcttttttttttttttttgtcaaggccttgctctgctgccagactagagtgcaatggtgcgacctcggctcattgcacctctgactcctggattcaagcgattctcctgactcagcctcctgagtagctgggactacaggccaccacgcccagctaatttttgtattttttgtagagacgaggttttgccatgttggccaagctggccctgaactcctgacctcaagtgatctgtgctcccttggcctcccaaagtgctgggattacaggcatgagccaccgtgtgtggcctattatcatatttttaaaaatcaaaatgaatttaaaaatgaatgatgaacaaaacatcaacattctatataaaattggtatctgaccctgcatttgcaggaactgacctcaccctcttcctggccctggggacatcaagacacctcacccctacatacatcagacaagtgtcttaggaaggtcatattcctatataagcacacacacctgtgagaattactaattgttagttaatatcttttttatttttcagagagggtctctctctgtcgcccaggctggagtgcagtggtatgatcatgggtcactgcagccttgaacttatgagctcaagtgatcctcctgcctcagcctcccaagtagctgaaactacagatgtgcacaaccatacctggttaatttttaaatttattgtagagagggtgtctcactatattgcccaggctggtctccaactcttgggctcaagcgatccccccagtgtgctgggattacatggcgcctggccatcagaaatatttctaatctggccctttaccaaaatatatatatatatttaccaaatatatacgtgtctatatatatacatgcacatatatacacatatatacacacacatatatacacatatatatacacatatacatatatacgtatatatgtgtgtatatacacacatacatatgtatatatgtatatatacacatacatatgtatatatgtatatatacacacacatatgtatatacatatgtgtatatgcacatatatacatacacacacacacacatatacttatgtatatatgcctacccttggtcttaaagcttggctaaatttagggtaaacatcttttatataggctttctttttttagagtagttttaggttcacagcaaaattaagtggaaggtgcagagatttcccatctaccctatgcacccctcatgcacagcctcctccatcaacatccctcactctaacaaacgcagagcggtgcatttgttacaatggatgaactcgcattgacacttccttatcagaggagagacaattttttttttttgagacggagttttgctcttgttgcccaggctggagtgcaatggtgcgatctcggctcactgcaacctccgcctcccgggttcaagccgttctcctgcctcagcctcccaagtagctggaattacaggtgtacgccaccacaccaggctaatttttgtatttttagtagagacagggttttgccattttggccaggctggtctgaaactcctggcctcaagtgatccacccgacttggcctcccaaagtgctgggatgacaggcatgagccactgcaactggcccaggatagacatttttgacaagtatacttcataggtgtgtccattctccatcactacttagtaaattattgcaaagttagaagcttaaaataacatccacttcttatcttacaatttctgcaagtcaggagtctgggcatggcatgactggattctttgttcaggatctcacaaggtgtcagccggactgggctctcattgagagcctcagggtcttcatccaagctccttcagattcttggcagaattaagcccttcaaagctataggagtggagacctcagctgcccctctccataggcagtttgcaaaacagctgcttccttcttcaaggccagcagcattgtatttctctgatgcttcatctctgacctcaaactcagactcagactcagactcagattgtcttttaaaaaaatttttttttggccaggtgcagtggttcacacctgtaatcccagcactttggaaggcccaggctggcagatcatgaggtcaagagatacagaccatcctggccaacatggtgaaaccctgtctctactaaaaatgcaaaaaattagctgggcatggtggtgcgcgcctgtagtctcagctactcaggaggctgaggcaggagaatcagttgaacccaggagatggaggttgctgtgagccaacatcatgccactgcactctagcctggtgacagagtgagactctgtctcaaaaaacaaaaaaaatttttttagagatgaggtcttgctgtgttgcccaggctggtctcaaactcctggcctcaagtgatccgcctgcctctcaaagtgctgggattacaggtttgagccactgcacctggcccagtagcacctttttatgtttgataaaaataagaatatccagcctaggcaacttagtgagaccctgtctgtaaaaaaaataaaaataaaaaattagccaggcatggtggcacgtacctgtagtcctggctactcaggaggtcaaggctgcagtgagctgtgattgcaccattgcactccagcctgggcaacagagcgagtacctgtttcagaaaataaataaatggaaataaaattaaaagatgtctttgtactattgtcctcatgataaatatacacatgtgtgcacatacatacatgtacacacatgccccagatggaactggcttgtggttttgtcagaggcgtttgaaacaagcttactccatctagaataggggctgggtaaaatgaggctgagacctgcagggctgcattcccgggaggttaggcattctaagccacagggtgaggtaggaggtggacggaagacccaggtcacaaagaccctgctgataaaacaggattctggggcggggtgggggtcggggggcattgtttgtttgtttgtttttgtttttgtttgagacagagtttcgctcttgttgcccaggctagagtgcaatgaatggcgcgatcttggctcactgcaaactctgcctcctgggttcaagagattcccctgtctcagcctcctgagtagctggtattataggcacatgctaccatgcctggctaatttttgtatttttagtagagacggagtttcatcatatttatcaggctggtctcgaactcctgacctcgggtgatccacctgcctcggcctcccaaagtgctgggattacaggcgtgagccactgcgcccggcccatgcagggtttttgttgttgttgttgttgttgttgtttttgagacagagtcttgctctgtcacccaggctggagtgcagtggcatggtcttggctcactgaaacctccacctcctgggttcaagcgattctcctgcctcagcctcctgagtagctgggattacaggcgcccgccaccacgcctggctaatttttttttttttttttgagtaaagatgggggtttcaccatgttggccaggctggcctcgaactcctgacctcaggtgattcgcccaccttggcctcccaaagggctgggattacaggcgtgagccaccgtgccgggccaggatgcagggttttatcagcatggtgtgaaagtgacctctggttgtcctcactgctcattatacactaattataatacattagcatgctaagagacactcccaccagcgccatgacagttacaaatgccatggcaacttccagaagttaccctataggttctaaaagggtagggacccctaagttctgggaaatcttcgccccttttctcagaaaactcatgagtaatccatcccttgtttaacctataatcaagaaataactgtaagtatatgcaatcgagcagcccatatcactgctctgcctgtggagtagccattcttttattcctttactttctttttcttcatttttaaaatttatttttattttttgagatgcagttttgctctggtcacccaggctagagcgcaatggtgcgatctcggctcactgcaacctccgcctcccaggttcaagtgattctcctgcctcagcctcccgagtagctgggattacaggcgtccaccaccatgcccagctaatttttgtatttttagttgagacagggtttcaccatcttgaccaggctggtctcgaactcctgaactcaggtgatctgccttcctcggtctcccaaagtgttggaattacaggcatgagccactgcacctagccttttttctttttttttgagacaggatcttgctctgtttcccaggctggagagcagtgacacgaccatggctcactgcagccttgacttcttggactcaagcaattctcctgcctcagcctcccaaatagctgggactgcagacgtgcaccaccacgccaggctaattttttgttttgttttgtttgtttgtttgttttttgtagagaaaaagcgatctgtctgccttcgtctcccaaagtgctgggattacaggcgtgagccacctggcctcctttactttcttaaacttactttatggacttgtccagaattctttcttgcatgagatccaagaactctctcttggggtctggatgaagaccccttttcggtaacagtttcctcttccccaaatgaaagagggcctttgctgatcatttgagagaaaacaaatttgagtagaagccacactccctgtggggaggggcacactgtgggacaactctgttggccctcaaggacgatgactaataggttgctgatgtcagaggcatttgaaccagagcaacaacatcttgaataggggctgggtaaaataaggctgagacctactgggctgcattcccagatggttaggtcattctaagtcacaggatgagttaggaggtcagcacaagatacgggtcataaagaccttactggcctggcgcggtggctcatgcctgtaatcccagcactttgggaggctgaggtgggtggatcacctgaggtcgggagtttgaaaccagcctgaccaacatggagaaacctcgtctctactaaaaatgcaaaattagccgggcctggtggtgcgcacctgtaatctcagctattcgggaggctgaggcaggagaatcacttgaactgggaggtggaggttacagtgagccaagattgcgccattgcactccagcctgaataacaagagtgaaacttcgtctaaaacaaacaaaaacaaacaaacaaaaaaaacctagctgataaaatagcctgcagtaaagaagccagccaaaaccaagatggagacaagagtggcctctggttgtcctcactgctgtactcctaccggtgccatgacagtttacaaatgccatggcaacatcaggaagttaccctatatggtctaaaaaggggaggcataaataatccaccccttgattagcgtatcatcaagaaataactggccaggcgcggtggctcatgcctgtaatcccaatactttgggaggctttggtggatagatcatttgaggtcaggagtttgagaccagcctggccaacatgataagacccccgtctctaatactaaaaatacaaaaattagccaggcgtggtggcacgcacctgtaatcccagctacttgggaggctgaggtaggagaatcgcttgaacctggaaggcagaggttgcagtgagctgcaatcgcgccactgcactctagcctgggcgacagagtaagacttcgtctcaaaaggaaataaccattaaaatgggcggccaggcgctgtggctcacacctgtaatcccagcattttgggaggccaaggtgggcggatcacgaggtcaggagatcaagaccatcctggctaacatggtgaaaccccatctctactaaaaatacaaaaaaaattagccaggtgtggtggcaggcgcctgtagtcccagctactcgggaggctgaggcaggagaatggcatgaacctgggaggcggagcttgcagtgagccacgatggcgccactgcactccagcctgggcgacagaacgagactctgtctaagaaaaagggcaaccagcagccctgggggctgctctgtctatggagtagccattctttagtcctttactttcctaataaacttactttcagtttactgtatggactggccctgaattctttcttgcgtgagatccaagaaccctctcttggggtctggattgggacccctttcccgtaacagtgtcagaggtgtttgaaccagaggaaccccgacttgaataggggctgggtaaaataagactaagacctactgcactgcattcccagatggttaaagcattcttagtcacaggatgagataggaggtcagcacaacatacgggtcataaagaccttgctgataaaacaggttgcagtaaagaagccggccaaaatctacccaaatcaaaatgacctctggtggtcctcactgctacactcccaccagcgccaagacagtttagaaatgccatggcaacgtcaggaagttaccctctatggtctaaaaagaggaggcatgaataatccaccccttgtttagcatatcatcaagaaataaatcataaaaatggggaataagcggccctcggggctgctctgtctgtggagtagccattctttgttcctttattttccttataaacttgctttcactttacagactctccctgaattctttcttgcgtgaaatccaaaaaccctctctggggggtctggatcgggacccatttcctgtaacactgggaggctttggtaagaaacggactgtccagacatctggtggccacagagtgttcagtctgccttcgctgctcttcctggctgggagccacaaatcttccatgctttactttctaaataccactcccttccacccaccgctctctacttccactgctcccatcctggtctaagccaccatcgtcctttgcctaaatgatgaaacagcctccctccaccctccctggctccgctccaatcactttcctgcagagcagccagagtgatcactttcaaatgcaaacctgaacttgcagctcctccgctcaaagcccttggatggtttccaccagcgtgaatgctaaagcctgaactcagtgcataaggtgctgtgtgttccgctcctctggctgctccgggattatcttgtactctctttcttcccctccctctctgcagcctgggaaactcgtcttaaaaaaaaaaaaactcttgaaatgtaccatgctgtctcccacctcaaaaatcacagctgttcgtgatttttctcatgatgaatgcctacgcattcttcagatctcagctagaatgccacctcctctgggaagcctccctcatctcctgcaagactgggttaggtttccctaggtaacaggtggtattttccaaaaatagccacaacatatttcctgtcccacatgatactcttggccatttgccctcctcttgaatttaggaaaaactttgtaacagcctgtatggaaagaatgcaatggaaatgattctgcgtgacttccgagtctgggtgagaaaaggtaatatgggagctgggtgcagtgatgcatgcctgtagtcccagctactcaacagattgacgtgggaggatcctttgagtccaggagtttgaggccagcctgggccagcctgagaccctgagtcccaccccaacccctgccatctccggaagaagaagaaggagaaggagaagaggaagaagaagaggaagaggaagaagaaaaagaaaagatgatatgattcccacctggctcacacgctcacttgttcttagaacggtagttgtgaagaagctcaggctgcaaggagaccacatgtaggtattccaagcaacggccccagcgagggtctcggcctgtagcctgtagcaactgacatacatatgtgtgagcaaacattcaggtgattccagcccccagactttgagccacccagctgatgccaaggttgagttattcctcccaagcctgcccaaattgcagattgaagagtaaaatgaatgtctcttttctttctttttttttttttttcaagacagggtcttgctcttgctctgttccccaggctggagtgcagtggcgcaatctcagctcattgcaacctccaccttctgggttcaagcgatactcatgcctcaacctcccaagtagctgggattacaggtgtgtgccaccacacctggctaattattgtatttttagtagagatgggatttcaccatcttgtccaggctggtcttgaactcctggcctcatgtgatccacccacctctgcctcccaaagtgctgggattacagccatgagccacttgccccgtgaatgttgttgtcatttgaagcttctaagtcttgagctgctttttattttcttttacagaaagcccagaccttacaatgtttttattttttctctccatttttctttctttttaatgtttttgtacagatgggatcttgctatgttgcctgggctggtctcaaactcctggcctcaatgcatgcccccaccttggcctcccaaagtgctgggattgtcaagggctcatttgttacacagtcatagcaacagaaatttaggaactgttacatgtataccttctctttaaagtatttgttacatgtgaaactttacatttgtgtgattactagattcctgtctatcctgagagactaaaagctcttaacggccaaatttgcgttcctttttaccattctattcctgacacttagcaaggtgcctggtaaatgatgcactcgatgccaatttactctcaactttcctgcacctcttcacttataaaaagagaaagcacttggtcattaattgaacgttcacttatttgatgaatgctgactgagagactgtgtcagggatttgtattagagacggacacaaaacaaatatgaaatacaagggactgaggggagacatagaaggggactgggaacacttcctgagggaaagggatatttgggctgcgtttagaaggatgtataggtgttttctgaataacaaagaggcatgacagtacttctggcaaaggaaatggtgagtgccaatgcttgggaccaggaagcagccaggttggtcaggcaattgtgtgaagttctgcacagaggcaggcagtttgcttggaaaatcctgcaggaaaaggttcctaaggaccaattctgacagcctgcaatgtaggtgcttagatttcatctcattagaaataggaagaccttggaggtttggaaggagtggtggaaaaagtggagttttttgtttttctgtttttttttttttaagagatgagatgctctttaaaaaaaaaaaaaaaaaaaagcactgctatgcttcccaggctggggtgtgcagtggcaagatcatggctcactgcagccttgaactcttgggcatgagcaatcctgcctcagcctcccgagtagctgggactaaacgtgtgcaccaccacgcccagctaattttttcattttattttattatttaattaattaattaattaattttttgagacagagtttttgctcttgttgcccaggctggagtgcaatggcgtgatcttggctcactgcaacctccgcctcccgggttcaagcaattctcttgcctcagcctcccgagtagctgggattacaggcatgcgccacaaagcccggctaattttgtatttttagtagagacggggtttctccatgttggtcaggctaatctccaactccagacctcaggtgatctgcccgcctcggcgtcccaaagtgctgggattacaggcgtgagccacggcgcccagccaattttttcattttctttttctttttttcaaggcccggctaattttttgtatttttagtagagacggggttgcaccgtgttagccaggatggtctctatctcctgacctcgtgatccgtccgcctcggcctcccaaagtgctgggattacaggcgtgagccaccatccccagcctagagttcttgatagtatcagggctgagaaagtaccagagttagagccaggtggggtggcactaaaagtacaaaaaattagcagggcgcagtggcgggcgcctgtagtcccagctactcaggaggctgaggcaggagaatggtgtgaactcgggaggcggagcttgcagtgagcggaaatcgcgccactgcactccagcctgggcgacagagcgagactctgtctcaaaaaaaaaaaaaaaaaaaaaaaaaaaaaaagaaagtaccagagttaggaggctcctaaactggtccagatgggaagtgacggggccaaggatagggaagtgaagatgggaggagtaggactaacttaaaggccatttagcaaaaattcaccacgcaaggccctatattagggcgctgggggctcatacctcatcgtcccgtcaactctataaagcaggggccaacaaactttttccataaaaggccagatcgtaaatacttcagggtctgcagatctgtaggatctttagcaactacctactctgttgtaaggcgaaagcaggcagagaagccaggtaaacgcgtgggcgtgtctgtgtgctaataaaactttattcagggaccctcaaatgtgaatttcacaaacttttcacaggtcatagactattcttctttggatttttcccccggctatgtaaacatgtaaaaataattctgagcttgcggggccggacaaagtaggcggcgggtcttggctcgcctacccctgctatataaatcattaattatgataccaatcttaaggagaaggtcttcagaagagtccctcaaagagcaccgcccctcaacgtcatcaaaccccgcctccaaaggcggaggctgcgcatgcgcggcaggacctcgggcgggggcggggcggggcgcagctccgacttcggacatggcgcacgctggcggtggcagcggtggcagcggtgccggcggccccgcgggccgggggctgagcggcgcccgctggggtcgctcgggctccgcaggccacgagaagctgccggtgcacgtgagtggcgtccccgccctccctcggggaacccatcttctggaccccgcgggcgggcgcccctcacccaggccccgcccggccccagccccacctcggcctcccctctgcactgccccggacccctcacccctcacctctcacctcggccctccgaaagcccagcccatccccttcccctcagggaccccggcccctcgtcccctcgttccgcggccagggcccaccgggaccctccccctctctgcaggtagaagacgccctcacctatctggaccaggtgaagatccgctttggcagcgaccctgccacctacaacggcttcctggagatcatgaaggagttcaaaagccagaggtaccagcggggcccctctccacctcaggggacccccctgggccggaatcgggcctagcggggtgagacctcccctctccagcctgcccccttagccgggtgaccttgcgcaggttgtccaatctctcagagccctagctccttctcgtaacaaaaatggaaatgggtagtacccaccttgtggagctttgtggggattcctggaagcaggacagggatctggggggaggcagggagggcgaggccgtgcacactcatagagtcaaatcctgccttgatttaatatgttgatttttatattagttttgttcatgaaagatttggtgggacccattttgatttttattttcaagcgctgtaaaatgttattgtcttgatgattgaaatttttggcaccctcttcccctttaatcttgtcctcaagatgcttctctgggctcactgtggtcccaggcctgcttggaagtaagacgcataaaatgcttagtaagggagctggcacacagaaaacgtttaaaacacatgagatgattttgcaggcccagaatcaaggaagattacagatagatgggaaaccctgggatcatgcccttgtttttataggagactcactgaggtttggagtgggtaagggacccacctaagtggcagaggtgtcactagaactcagaccctctgactcagattcttggaagtcacatgcttaccatactgctgccccctcttaggaaacatggtggggctggcctggtttccttccgggagcccagtgctaagggctgggctgcaatgcagccagaagggagaccccatctctcccctcctatttttcttacacctttcccattcttggcagtaccattggtatttatgcattgcaattgtttgctcagatggaaacctgtgtcatagtcatctctatctgatacaaaatgagggaagttttcacattgcttagaggactttggcctcctgccatttcttggagtccaggccttgcggttggctctcctgacattttcagaaccgagtacccattcttggagtgttttaggggagctgagcgatgtcagtattctctggttctcaccaggagggaacagggagctcaggcctagccagtcaggagataggtcatggtgtacagatgctatcacatgggggcacttttttttttttttttgagatggattctcgtgctgtcgcccaggctggagtgcagtggtgtgatctgggctcactgcagcctccgcctcccgggtgcaagtgattcttgtgcctctgcctcctgagtagctgggactgcaggcacgcaccaccactccaagttcgtttttgtatttttagtacagacagggtttcaccatgttgaccagtctggtctcgaactcttgacctcaggtgatctgcctgcctcggcctcctaaagtgctgggattacaggcatgagccactgcgcctggtgggtcacattttaggttcctttgttgtctgttgagaaggtttttatgtggcagtatcaagggagtggggaatagattatatttttcatttatttcccaagacccttttgcccacttccgttgtttcttctagcatcgatactcctggagtcatcagacgtgtctcgcagctcttccacgagcaccctgacctcattgttggattcaacgcttttcttcccctcggatatagaatagacattcccaagaatggcaagttaaacatacagtcgcctctgacaagccaggtatgccactacagtggttcgggtgatctcagccttcaccgagtatgtcttgctactcaggttgggccacgtgtctctcctgtatcattgctagaaagccacttaagatctgttctttttctagacgtgctcattgcttctagcacaaatcaaaatagatatggaaacacctacacaagcagcctctgcctcccaaattgatctgtttggaagatttaaatcaagagtggatgtcagggaggtatcctcctaacgcagaattttgtgtgaagtctaaataaccacctcagcagttgctgaggtcttggcttgaggctttcccagcgagcataccaggcaggcttgcccttgtatttaagcatgtcctcgtctgcctctgatcactctcagtaccacctacaaaataaagtggtcgagatggtgtgtgagtagccacgtttatgttggctgtgtttcatttaattgttgataggatcattagctcagctgggactcctggctttgctttggtcccttttttcttgggtgataggtgctggccctctttttttttttttttttttttttggagacggagtctggctctgtcacccaggctggagtgcagtggcgcaatctcagctcagtgcaacctccgcctcccaggttcaagcaattctcctgcctcagcctcccgagtagctgggattacaggtgtgcaccaccatgcttagctaatttttgtatttttagtagagatggggtttcttcatgttggccaggctgttcttgagctcctgacctcaagtgatctgcctgcttcagcttcccaaagtgctaggattacaggcgtgagccaccgtgcccagcctccttttttttttttttttttaagacaggttctcactctgttgcccaggctggagtgcagtggtgccatcatatctcactgcagcctcaacctcctgggctcaagtgatcctcccgtctcagcctcctaagtagctaggactacaggcgtgcaccaccacggccagctaatttatttattttttttgtagcgacagggtctcactatgttgcccagggttggtctcgatctcctggcctcaagcgatgtgcccaccttggcctcccacagtgctgggattacaggagtgagccactgtgcctggctcactgccccttctatctctgcagtctcttcatgcttgagcttactagcgcctctgagaaaaagaaagcctacttaagatttccttttataagatgaccattgtcattttttccacctcaacactatttcccatttaaggcataattctttgctgttgggggcttcccagtgcattgtggggtgtttagcaggatctgtagcgtgtacctaccagaccttcactcagttctgacagccagaaatgtctccagacattgccaggtgtctccctggggggcaaaagtgcccctgttgagaaccaccggtgtaagtggaccagctctcccaacctcctccagtccttgcctcgagagttttagcagggagtgtcagaatctactgctggaagcacttggtaggtcttctttgatggaagagatgatagagcgtccaatcaattagggatctgacactccgcagtcagttggaaagagaacagcgaagggtaatgtggcagtgcttttgtattaattccatgtgcaaggtgtgtgtcaattctgctgcttctcggccaggcgcagtggctcacgcctgtaatcccagcactttggggggccgagatgggtagattacaaggtcaggagttcaagaccagcctggccatcatggtgaaaccctgtctctactaaaagtacaaaaatcagccaggcgcagtggagcatgcctgtaatcccagctacttgggaggctgaggcatgagaattgcttgaacctgggaggcggaggttgcagtgagcagagattgtgccactgcactgtagcctgggtgacagagcaagactccgtctcaaaaaaaaaaaaaattctgctgcttctctgtgcaagaccctctctgccatcagcctgttgtctcctgaaagccaaggagcgagtctcagggttttttttttgccttttttgagaaggagtctcgctctgtcacccaggctggagttcagtggcgcaatctcggctccctgcaacctccacctcctgggttcaagagattctcctgcctcagcgtgctgagtagctgggattacaggcacgcttcatcatgcccggctaatttttttgtatttttagtggagatgggggtttcgccatgttggtcaggctggtctcgaactcctgaccccgtgattcgcccacctctgcctcccaaagtgctgggattacaggtgtgagccaccgcacccagctgaatctcagctttaaaggggaacttggaagcgtgtggccactgaactctgaagagccttccatttcctgtttgcaaatgaagccccaggatccagatgtactgcttgtgtcttagaccatgaaagccttagcaagactgatctccagaacagtcacgactgcgggagaaagccaagctcatttgcaatagcagcgtccaccagagcactttgcagagcctgaatgctgtggaaactctgggtctcgttcctgtcactcactcagaaagagccagagtgaaaagatgtgaactgtgcgtcctgcatgtggaaattgcctttcagcagagtccctgcccgtggagtaactcggctttcagggctagatcttgacaggcgccacactggttgtatttggagttggctcttcctttaagtagctgcgggtccccaaccgtggagggctggcagtcttgtctccccgtaggtggcttaggtgacaatgatgacggtgcagacccatcgacttggggaaaggcttgaaaagaactttcacttagtagctactcagcagggccttggtcatcgtgctgcagcctgggaacagtcatttccaggcttaggtgtagaagtttgttctcttcgggggcccctgggagcccactggcttccagttgatattgacacaggtgctgtcaggtttccagccctgtttcccagcagtctgggctgttgtttgtgtggcttcaggacagaaacatgagagatatcccaggtccaggccatgactcgcgtggcttcaggagtcctttgagctttcggctccctggagtcctttgagaggccatcgtctgaaagcctcacagggtttcccacacacagaggccctggtgatattctttctttctttcttttctttctttttttttttttttgtgacagagtttcagagtttcgctctttacccacgctggagtgcaatgacacaatctcgactcaccgcatcctctgcctccccagttcaagcgattctcctccctcagcctcctgagtaactgggattacaggcatgcaccagcgcgcccgactaattttgtatttttagtagagacggggtttctccatattggtcaggctggtcttgaactcccgacctcacgtgatctgcctgcctcggcctcccaaagtactgggattacaggcatgagccactgcacctggccatcttttttttttttttttttgagacagagtctcgctgtgttgcccaggctggagtgcaatggcacgatcttggctcgctgcatcctctgcctcccgggttcaagtgattctcctgcctcagcctcctgagtagctgggattacaggtgcctgccaccactatcagctaatttttgtatttttagtagagatgggatttcaccatgttggtcaggctggtttcgaaatcccctgacctcatgatctgcccacctcggcctcccaaagttctttttttttttttttttactttaattgaattattttttaattttgagacaccatttcactgtcacccaggctagagtacaatggcgtgatctcagctcactgcagcctccgcctctgaggttcaagtcattctcctgcctcagcctcccaagtagctgctattacaggcatgtgccaccacacccagctaatttttgtatttttagtagagacaggttttcaccatgttggccaggctggtctcgaacccctgacctcaagtgatcccccacctcagcctcccaaagtgttgagattacaggcgttagccactgtgcctggccttttttacatttttaaaacagagacagggtttcaccatgttgtccaggctggactcaagtgatcctcctgccttggcctcccaaagttttgggattacaggtgtgacccaccacgcctggccagtattctctgttgcttagtttttctagtttgactgttttgaagtatctttttccccccccaattttatcacaaagcctgccagctactgacaagtagggagtggcccataggtggtaaggaaggtgaataagagagtcccagcctcgggcagcctttggcgcagggtgtcttcagctttgggggccagactgttctttatggcgaggtgccgtcctgcacactgaagggtatttgagcagcctccctggcctccacccaccagatgcttctagatgtgataacctaaagtgtctcccgtgttgccgagtgtcccctgggtggcagagttgctcaggttgagaacacgagtctaaaggggaagacagacacaggccgtggtgtgtggccagtgacgacctggggaatttggaggaaggaacagcttcttactggagccttgccttggcctcctgagtcagcatcatttactgtctggtaattcaggccttggttgtaatgtcagctccacagagagccccctagtccctaccctgtgtcattcttacaccaccctgggttatgtatttcaaaacggctaggaaaagaagttcagaatgcattgtttcttattggttttccttccttggttgacggtgagtccttaagatgaggtgggccctgcactgtcttgttcatgactgtatccaccttctggaacgtcgccagggagcagtgcatggtgcaggaatgagaaactggatgctggtgggaacatggccgctctcagctagcgggtcctcttcagggcagaccctgcctcgtggaagatgacagctggcttggacagagacagagataaccccttaacgtgcagctcctaacttaagcagcccctcgacattcaaagggagccccctggctgttctctgggggaagtcccgctagttgtcaacaagtcgattcttgtgtttgtatcttcttggctcatggagcaggcggtgaccccttctccgagccaggccctggggtttattcagaggccctgctttcagggttcctgcacagtcaaggtggggggtccgatgagaaacagatgggcagatgcgggtggcgcatgggagagggcagagagaggatggagcaggccagggaagggtgggaggaggttgctgtgggcaggacctgtttcatgagggactgttcctggtggggagtgatggcctgaggtgagagtgagtgggtgtgcttgaggaacagccaaggagaacggcagggtcaggagctgaaggagagaagggggagagggagccaggagcgtgagaaccactggatggttctgggaggcggttctgctgctgtgctgagaatgaggggtcaggaggcccctgggagaccagggaggggccccaagtgatggaggcggggtagacagtgatggaaacagagtggatggtgacaaggaccagagagggtcccaagtgatgggaacagagaggatggtgacaaggaccagagacaattcccaagtgatgaggacagaatggatggtaacaaggagtagggaaggcctcccgagtgatggggacagaggtggacagcaatggcgacagagtggatggtgacaaggaccagagacagtccccaagtgatggggactgagtagacagtgatgaggacagagtggatggtaacaaggactggagagggatcccccgagtgatggggacggagtggacagtgataaggaccagagaagtgccctgagtgatggggacagagtgactggtgacaaggaccagagggggttcccatgtgatgggggcagagtggatgatgatgtagatcaggagcgggggtgtcagtgagagtgagaagtctgggctgatctcaggatgcctgattctctgggtaaaagtgtgggcccctgctgaggtgcataaggccagggcagttggggggctgctatgtgtctgtgcggtgcctgccatttgaggctctgttaatcagtacccaggcggggctgtgtgtggatgctcagatggacgtgtcggccacgcaggatggttgtcatggtgtgggaggcagttcgaactctgcctgatgaggccacccagggcacggggagagaggaggtgccggaagaaaaagaaaactgggcttgtgctgggtggtttagagcagcacagtcggcaaatggtagcttggagaccaaagccagcctggctcggtgtgattggttgtgatttttacattttcaaaggattaaatttttaaaaatgtttcatattgtgatactgttcacataacataaaatcatcatcattttaaagtgttagtatattcacaatactgtacaaccatcaccactaattccagaacattaacatcaccccaggatcaaaccctgaacctcctaattctcctctccccaagcccctggcaaccatgagtctgcttcctgtctttatggatttgcccgtatggacatttcatatcagtggggtcatacaccgtgtggctgttggtgtctggcttctcactcagcatcgtgttttccggggtcattcacatcggagccggtatcagtgcttccttccttaagactgaatcattctccactgtatggcaggaccacatttcgcatgcccactcttctgttgatggatgtttggcctgtttccaccttttggctgttgtgcatagtgctgcaacgaacattcatgtgtgaggatgtgttggaacacgtgttttctttttctttttttttcgagacagagtctcgctctgtcgcccaggctggagtgcagtggcggggtctcagctcactaaaacttctgcttctcaggttcaagcaattctcctgcttcagccttccaagtagccgggattacaagttcccaccaccacgcctggctaatttttttgcatttttagtagagatagggtttcaccatgttggccaggctagtcttgaactcctgacctcgtgatccgccatccttggcctcccaaagtgctgggattacaggttccagccaccgcgcctggcttttttttttttttttttttgagatggggttttgcttttgtttcccaggctggagtgcggtggtgcattgtcggctcaccacaaccccctgggttcaagcaattcttcctcctcagcctcccaagtagctgggtctataggtgcacaccaccacacctggctaatttttgtatttttagtggagacggggttttgcaatgttggccaggctcgtctcaaactcctgacttcaagggatctgtccacctcaacctcccaaagtgctagaattacaggtgtgagccactgcgcctggcctgagccactgtccctggcctgagcaccttttttcagttctcttggttatagacctgggagtgggattaccaggtcatatggtagcaataattccatggtcaacctgttgaggtaactgccacactgtccctcgtggtggctgtaccgtcccatctggctctttttgccaagccctggtctagagcgtggttccccattttgtcgcagtggcacactttaggggatcagagggtgcatgcggagcttggaaatgcctccttggaatggtggggggctcgcagtgagcctacagctgcctctgaaacagaccttggctccatgctgcttccctacatacccacaccctgctcgttccgaccccttctgccatcaaacctgtgcaccatggagaaacagacgcagccccctgtgagcctgagcagagaatcattccggacatccccagagaatcttacaacaaaccccgccactgactgggcgcagtggtttacgcctgtaatctcagcactttgggaggccaaggtgggcagatcacttgaggtcaagcgagaccagcctggccaatatggtgaaaccccatctctactaaaaatagaaaaattagccagcgtggtcgcacggcacctgtgatcccagctactcaggagaatcacttgaacccgggaggcaaaggttgcagtgagccgggatcataccactgcactccagcctgggagacagagcaagactccatctcaaaacaaaaagaacaaatcccgccaccaaggagaaattgttttagaatcgtggctgctctgcgtcttgtatttctgcttttctcagctgagactttctagaattgtctctgtacccattgttctgggcagaattgtgtcatccccccaccccacattccaccccaaattcatgtattttagccctagccccagcgcctcagaacgtgactgtatttggagatggagcctttgaagaggtgatttaactgaggccgttagggtaggccctaatccagtctgattggtgtccttataagagaggagattgggacacacatcagggacatgcgtgcacagagagaagaccacatgaggacacagacagtggccacccacaagccaaggagagagtccttagagaaaaccaaacctcctggcaccttgaccttggcctcctggcctccaggcctccagaactgagaactactaacttctgttgtttcagccagtctggggtacctcgttgtggcagcctgagctgatggatgcactcaccccactgacggtgcctgtgcccagcagaggtacctgtttcagtacaagacggtagtggtgtgcctggccttgcctgttgcagtagattttcagggtcagcgtttgggtcacctgcagtgttgggcactgcagggcagcggaaacagtgaagtctgtgtgtcccttcatccgttcacctgatcatccccaacagtgggtgaagctcactctgtttctcacactgttctgggcactggggatacagccctgatcaaaacccccaccctcgtggagttcgccatctagtcagggactggcagacagtgcaatgagtaaaatacatgatccataaggtggtgacgggccgcggagaaaaatgcaggagtgctaggaggtggcgtcattttactttggtgaaagagcgttctctaggactcaccaagcagggcttatccaagcaaaaacctcagccaggctggaggaatcctgactggctggagacccagcccttgtgtgctggggatggtgcagcataattctggtttagaaacaacagctcctcctctgggggagtggtcctgtcccaccacaacatgggagggaggcaagcttctttctatttttgctcatatcggctgaaaagtacacgcatagagggcattcttggtgggtgttcagggcctgtcttttctcccaagcgaccgatgcaccttattgcgattggcctgggtcttagcaccaaaaatgtcatgtcccttgaagtccccaacaacctggacagtgggtcgcctctaacctccagggtccccatcttatatatcctaccttggcatcactgctggcagcagttgcctttccacgtgaaagcaatcttgctgaaacagattgcaggaggcgtgggagacttctctattatatgcagcccagcacttggcaccacagaggcttaaacatccactttgtacatttctcctgaatgtgaagttttccaaatgcaaggtgctcgttgaacttgttgtgttccttgagtagattggtaaggatcgggtggaggtgagctgggaagactcacctgtgcaccccgccctgcttgcctccaggctctcagaagtaacctttccctgtctctaatacagcttggctccgtgctgagttttttctgttcctgtgcagacagtggctgggcctggtgtttttcacaatctgtttccagtgtcgggcctggcagtaactcattgtcgccttgtcaggagaattcgcacaaccacggggacggtgcagaggacttcaagcagcaggtgccgtataaagaggacaaaccccaggtgcccctggagtccgattccgtggaattcaacaacgccatcagctatgtgaataagattaaaacccgcttcctagaccacccagaaatctacaggtcattcctggagatcctgcacacgtaccaggtaagaactcagattacaattccttgtgggttttggatttcatccagtttggggccctgcagatattcagattttcttgtcggaattcataaaatcctgtaaaattctaattagttgtggggttttttgtttgttttttcttagagtctggctctgttacccaggctggagtgcagtggcacggactcggctcattgcaacctccacctcctgggctcaagccatcctccaacttcagcctcccaagtagcggaggctacttggggctagaacatgggcgcacatcaccacacctagctaatttttgtaatttttgtagagacagggttttgccatgttgctcaggctggtcttgaactcctgaactcaaacgacccatccacctcagcctcccaaagtgctgggattacaggtgtgagccaccgtgcccagccacctttttttttttttttttttgagacagggtcttgctctgtcacctaggctggagtgcagtggtgtaataatagctcactgcagccttgacctcctgggctcaagcgatcctcctgcctcagccctccaagtagctgggagtacaggtgtgtgtcaccacacctggccaagacagtctttttatcagatgactttgttattgcttaggcaatacggccatcctttactttgctgattacaactgggcccagcaccaggagctggggctacagagacaaatggctgctcctgcttagctgttcattgcagtggtgggaagaaactcagaggtggattggggtggaaaagaaaggatgtgggcaggagaggtgagtcagggttaatatgattcccagcccggttcccaacccgtccggggccagggaggggacagtcaggttgaatcttgacatatcagtcggaaccagtaggcaggttagcctggaggaagggtggacattcttggtgccaggaatggcctgtgcaaaggtccagagaccagagcagacagcggcatcagggcgtctgcaggggacttgggcaatgcaggtgggctggtggcgagggacatctgtgtcgtgagtggggcttagacgtcctcttcacccagacgtggagtctctaacgcttggaattttttttagcagcagaacccattttttttcttttttttgaaacagaatcttgcgctgtcacccaggctggagtgcagtggctcaatctcagctcactgcaacctcagcctcccggcttcaaacaattctcctgcctcagcctcctgagcagctgggactacaggcatgggccaccacgcccagctaattagcagaacccattttttaaaatgaaatccctgcagccttgacatgtcgagtcaagaagcgggattcttttcagcataagcgtttcagatcaaatggatagaatttgtgttctgggaactccacagcatttgttgtccaccgtgctggcatcatcatgggccttagcatctgtgagaggctggtacagccctaagaacgcttgtttgtcatggatgagtggttgccagtggctgctgtgagcatctggtctgtgtggagggatgtgcttgtgatcgtagaatctgtgggcccctcccaggctttgtggggtcatcacatttaggaaggcgcatcagagcagtctgtgcagtggctctgttctgtggcaaaggaaggggcaggttaaagacactagagatgaatttagacaaggtcacaatgaggggttgccacagactccttcagagagagtgccatgggaagggacaacgcagtatcccccaacccaaaccgggctgctgagagttggttgagaatgcagacacctggccaccatgcaggattcccattcatcagggcccgcccggcatcggcacagtttctttttttgtttttatttttttgagactgggtctcactgttgcccaggctggagtgcagcggcatcatcacagctcactgcagcctctacttctctgggctcaagcaatcctcccacctcagcctcctgagtgactgggactacaggcgctcactccgacgcccagctaagggctaagaggagacggggtttcaccatgttgcccaggtgggtcttggaactcctggcctcaagtgatccacccacctcagccccccaaagtactgggattacaggcgtgggccaccatacccagctggatggcatctgcattttaaacaaggcccctggtgactccagcctcaggttgtctagttttttcaaatgtaagtttgaactgttgtgtaaattatcctggttttagaatgttggttcagatatttcagggatactgttagagccaaaccaggcagctccagggtccatctggccgtgtgttactgtttctccatctttgtggggctttccttcagactttctctctgccaccttctccctcggggttcttatccgtaaaatggccacaaaactggtggtgccaatgagcctgggttcagtgaggttaactgagcaaccagttcaggcacaagcctgcctcaggtcacccctgggtaactgtcacccattacacagccacgtatgcatgtcctgtgtgtgctgggatgaacagttagtcctgccctaacataagtgggaccctaaaaacgagctccctctgcagagttgcaaagtgtgatgggaactgcaggttcatgggaaacagactcagggtatgacattcaaaaacttcctcagggacacctagaaaaagataggcaccgactctaaacagcagcgccgttacgcgcatattaagtggccgagaattacatgaatgccacagcaaatcgggtactgaccttggaagagacctgaggctggtttgtggatctggtggcagcctgtgaattatgtgaaggccgggaggaggtcatctgaaatcagacaggtcattgtggcctcagatggggacagggctggcccctagcacaggggaacgctgagagagtgcatggacatgggagggggtgctggcgtggttttgcatactcccacggggttctggtcagccgggagcagtttctgcattcacctggtgtttctcctgcacaaaatagaagagaagcaaacagaaaattcacctcatgctcaaattattcccagtacttgtatctcatttagacagacatcttgttcaaaataagcattctagcagaactgactgtctctgcagcatgaatttccagaaactacttccctaagttgagggcgtactatgcattcatagagatcactcaatttccttctaaaaggtggtaccaatttgtctttctgccttccgtgtttgattgtttgtttgtttgttttttgagacggagtctctttcacccaggctggagtgcagtggcgcaatctcgtctcactgcagcctccgcctcctgggctcaagcaattctcctgcttcaacctcccgagtagctgggactacaggcacgcgcccccacacccgggtaatttttgtatttttagtagagatagggtttcaccatcttggctaggctggtcttgaactcctgacctcaggtgatccgcctaccttggcctcccaaagtgctgggattacaggcctgagctaccgcacctggccttgccttctgtgtttgagagcacctgctccccacaccctcatcggaaatcctagcctcttctgtctgtgtagtcagatgagcagagatggctgtggcactgttttaaattgtttctttaaacatcagtcaatttggtcattgtttcttttcttctttatttattttagataggatcttgctctgttgcctaggctggagtatgcactatcatgatggtagctcactgcagccttgagctcctgggctcaagcaatcctcttgcctcagccttccaagtaactaggaccacaggagtgtgtcaccatgcctacataatgtttaaaacaaatttttttaatcatttctcagcattttggctaagatcaagtgtaaaattttttgtagcgatagggtctcactgtattgcccaggctggtcttgaactcttggactgaagccagtctcctgcctcggcctcccaaagtgctgggattacaggcatgagccatcatgcccagcctaaattgtttctttaaacttcactcagtgtggtcgttgttctgtccgtatgcagatagatcatttctatttattatctgaactgagtggcctttgcttgtttttaagttttgctttttagtgtcttttgatgactttttggaagggtggtgttttttttcccctgcagtgtaggtgctgccggtgccaagatttaaaacttgcttcccttcccacaggctgcagcgggtgcagaggggcaggaggcgccagcacagggattcctcctgctttgcagccgtgcagtgggactctggaagccacgccatattatccgggaggctccggtgctattgcctcttgttctgtgacactcttgggtgtaaaattgatacggacgtatttctaacagccacggcggttttgctggcccgttcctgccttccaacctgggttccctttggtcctcttgttgctttaaggtctggatcaggccattttccttgggtctcagtgactccgggccagtaggtgcctcggcctggaagtcccttcccttcatggcccagcgctccccagttctacactccccatttcccttgggaaggcctggggttcgcccctgaccttgtacttccccggcccacccctgattacagccagcctgtcacctccctgccccctctgttcgtggacactgctgggtccccaccatactcctggacgggacctgcccatggccggggctcaggccatgctgggcagcaagatccacaagtgtgcagacaggaccctgcgggcaggtgctctttcctgagagtcatcctgtccccttcacggagggctgcctgagtgtcccggcccagggcacagcactccttgactaacgacttattttccctttcctgaaaactggcagaaggagcagctgaacacgaggggccggccattccgaggcatgtctgaagaggaggtgttcaccgaggtggccaacctcttccggggccaggaggacctgctctcagagtttggacagttcctgcccgaagccaagcggtctctggtgagtgccgagagcccctgcccagcctcgggggcctcagcgaggacggagggccccagccagcttgacccatgtccgggccaagcctatgtaccctccaggccacactagggtcccccagaagctacgcaggttgcagatacccaggggttcctcactgtaggctccacctgcacagcaagctcgtaaacgatttgccaaggtgcttctctgtacagacagtacctggatcttggggtggtttgggaggcagagagcatcttccagtggagactatgggcccaggggttccacctcctgtgtctgccctgcagagccccaccctgcctgggaccccagccctgtgggaaggtgcaggagggctgggtccacaatcatcgcttcccctgttggatgagactgatctggggctccagcaggttggatctggaggagccagtagcgggggtggcctgtggcctggccctgaccatggtggtagagagcagagatgggcgaggaggggccttagacagggctcagggctcaccctgcacagtcagcctttctcccctgcctgtggcctgaagctgccagggccgcctgttccgattcctcttttttcccccactatgatcataagacttttttaaaaattgaagtgaaatttatgtaacatcgaattcaccattgaaagtgaacaattccatggcatgtggtacatcctcagtgttgtacaaccttcaccactacctagttccagaacattttcatccccctgaaaggagacccagtccccatcagcagccaccccattcacctcccccagctcctggcaacgcccatgtgcttcctgtttctgtggatttgattcgcccattctggacatttcagatgggtggaatgtcaccatatgtggcctttgtgtctggctcctctcactcagcatcatgttttcaaggtttatccatgtcgtaccgtggatcagtgctcattccttttcctggctgaatcatattctgttagatggatgagccacattctgtttatccgtattctgttgatggacatttgggttgtttctgccttttggctgttgtgaacagtgccgccatcaacatttattgcacggatttgtttgaacacctgttttcagttcttttgggtagacacctaggagtggaattcctgggtcacatgttaattctgtttttgactttttgaagagcctctaaactgttttctacagtgaccgcaccattttacattcctatcagcaatggactgcggtttctgtctctccacatgttggccaacatttgttcttttccaggtttttttttttttttttttgccttttgtttttagtagccatcagtgtgtgaagttttattgcattaaggtttgtttgtttttattttttgagacaggctctctgtctgtcacctaggctggagtgcagtggcgtaattgatcactgttcactgcaacctccatctcccaggctcaggtgatcctcccacctcagcctcctgagtagctgggactacagacaccaccacgatgccaggccaatttttgtattttttgtagagacagggcttcgccatgttgcccaggctggtctcgagctcctggcctcaagcgatccacctgcctcagtctcccaaagtgctgggattacaggtgtgagccactgcgcccggcctacttttattttttaattgtagagacagggtctcacaatgttgtccaggttggtctcagactcctggcctcaagcgatcctcccaccttggcctcccaaagtgttaggattacaagcatatgccattgtgcccagtccatggtttctttaagtggcatttatgcagggcacccggctagctcagtcagtagagcatgagactctcaaataacatttattaccaatttagctaagatttttagtgtgtattggtttattagagctatcttgtatatttagaaagattggatcaactttttaaaattattaaaagcactgcatctgttgtgtgaagtataatctttatgttaacttttggacatatattaaaactgtaggaaaaagaaaccaagatgaaatttggcattgctctaattaaatttgactggcctggatcagaggttggcaaaccttctctacaaagggccagatagtaagtatcacaggctttgcaggccagttgatctttgtgtaaagattcacctctgccctagtagcttgaaagcagtcatggaatatgtatgtcaatgactggacagggctgtgtgccaataacactttatttacaaaatgaatgggtgtggccgggtaccaacaaaactttatttacaaaatgaatgggcatgactgggtaccaataactttacaaaaggaatgggtgtggctaggtgctgataaaaaattttatttatgagaacaacaggccctgtgttaatttgccattccctagcctaggtggtctttgggggtccatctagctcagatgttcacataattgggagattaactgaaaagcaagaaccatgtgaactgttggggaagatctgctatacctgcttggtgagcttggctggacgcatggcgggtttcccctccaggtcccctgttcttgttcagcatttgtcatatggtcgcccagctgcatcttttgggaatcagtttacacctgttccagcatatacaaaaaatagccaagcgtggtggctcgtgcctgtaatcccagctacatagaaggctgaagcaagagaatcacttgaacccaggagacggaggttgcactgagctgagatcgcaccattgcgctccagcctgggtgacagagtgagacctccgtctcaaaaaaaaaaaaaaaaagatgtaccagtggagaattgtgtagatgccaatttctccacttacagctctcgaaatagccttgaattttgggtaattattccccccaaataattccccccaaaactcaaatagccttgagttttggtaattattccccccaaattattcttctaagtcttaactgtggctaaataataagtcttttttagtagtagtagtagtattgtggctaaataatgtctttattattattatggtaaaaatagtatacactaatgaaaaaataagtattagcaagagtatcaaatttttaatgcaaacttcctctcccttgactcagttcttagtcattcttctcagaggttagcacttctaagtgtcttgtatatctttccagaaatttcctctgcatgtgtaacaaatactttttacaaagcgacacacggcatcctatttgttctgccccttgggtttttggggtttttccttgtttttttttgtttgtttgttttatttcaggtatgcctgtccctaacagcagcccagagccagcccatagtatctgatcgctgcgggctgatttgttcagatgcaccatgacttgtccatctcacccacactttaggtctttgggggtgtctttgcatccaggtcctgtggtggcaggggaaggcggagtacgatggaggtgaccgcagtggcacagaacgttgtagggcctctccagctctgcccacgtcctgcagaaaagctgcggtctgtccatcgtcccctgcctgtccagccttccagtatgttcatagtagactgttgcagaacagttctttgtaaatgtcattggcaccctgtaggcaccctgctcgggacaagcatcctcgacctgttagccgatggctggagcctgggaggcaggccccgaaccagccacgagccccactctgctcccagcaagtgacgacatcatcccccagaaacgttttgtcattcatagaaaagacttcaaaacctggccccaaggcccccaccagtgccctggcaaacatcagccacttccccttgctgcctgtttctctgtccactgcaccttgtgtttctgtggtgccggcatgcacacggcgagatgccccaccagtggccgccacatgagcccccgcacgggaagacccaactcagctgtctccctcctgaaacccccagcccttctccctcccttatccataaaggcctcacaggagctttctcccagcctggcagtgttagtctgtgatgattcggttaccttggaatgtgagcatcttgctggagtcacctcacgcatggacggagcatctggcctggtgcccgtggccaccattgcccaccgggctgtgggctgagctggaagcagctctgcatgctcaggtgcatgggtccagccacgtctccggtgctgaccacctcccacatgtgtccttagttcacaggaaacgggccgtgcgagatgcacagcgtgcagaagaacgagcacgacaagaccccggagcacagcaggaagcgctcccggccctcgctcctccgccccgtgtctgcacccgccaaggtacctgtgagccacatgcagccatgcctgcacgcggggcccccagcaaatcgggccttcccagcatgtgaccagggaacagaggccccagcaggggttcggggctggaccgggggctgtgtgaggttcaccggcagtgggaccgttggaagtcagctctcctctaaggtggctgttcttccgttctccctgtcctgtgagattgttttgaaaaggaggaggaggaaggagtgttaaccctgccctaggtcccaagaaacagggtgtaccacccagtctccttttcaccctcaggactctctcacaggcaaggccgccatgtacgtttgttcaggttggtcactgcacagctgagggcagagaggggctgggatccagctcctgtcacgcctttcacctgcaatggtggttttccgattccattattccttgtgcagttactacttggctttctactattggtgggaactttgtcgtcctcccatttatttagttatgtatattagatatggactctgggttataatccattctagtgttgatgtccatactgttccagattgggccagcggggtccctttggctcttgtgtcctttttttctttcctttgagacagagtctcgctctgtcacccaggctggagtgcagtggcgcgatctcggctcactgcaagctccgcctcccgggttcacgccattgtcctgcctcagccttcctgtgtccttttggcatgtcctcatcattctttctcctgtggggggatggggtttcactctgccacctaggctggagtgcagtggcacagtcagccttgacctctgggctctagctgtcctctcacctcagccttccaagtagctgggaccacaggtgtgcaccaccacacctttttgtagagatgaggtttcatcgtgttgcccaggctggtctcgaactcctgggctcaaacaatcctcccgcctcagcctcccaaagtgttgggattacaggcgtgagtccctgcacccagctcatcctcattcttcaggcactttggagatagttctggatggacagtgttgtccttcttgccatgatcgtgcatccaagttcaggtccaagtccagcttagagacaaaagcctgcagagactcaacatttggcttctccagggtcttcccagtgccaccctcttcctgtccgcttcttgttgctgtcttggctctcaggacaaaacagggaaaggattctgagattgtcgtagccaggggcacatcccccttgcctttctgatgctgtggcactcttgcctgttacccaaagccctaccctgctgagatggagatcccagatttggcagtggcaggtatccccagaggtgtcatctcaggggtcctgggtaactgagcggctcctgcctgtccctcactgagcatctcatggcagttcccaaaggagagcacggtcttagccttcttgagactctgtgacagcgatggacagaggccaccggtgggaggcacagtgttaactgcatagaatttctccccacagaaaaaaatgaaacttcgtggtaccaaagacctgtccatcgctgcagtggggaagtacgggactctgcaggaattttctttctttgacaaggtgagggtgggccctggcttccatcttggggatgccatgtccagctggctgggccaatgctccctgggcctgccccaggattggggcggggagcaggtagggtgggtgcagtctgaggatggatccggcggggctggcccccagctttcactgcggaagggaatgtgggcctccttggagcccaggcatatactgtgggcaggagtcccagtgggtgctgagactccaagcagagtatgaagacatacatgtctgccaccctgcagctgtgtggctttttcttatatcagggatgattgtagggttcccgcccagggtctgtgggcagagcagacaaggtggccgtgtgcatgggctgtgaattgctgcatggattgcatgcacagactgtgaattgctgcatggatcacgtgcacgggctgtgtgaattgctgcatggacacatgcatggactgtgtgaattgctgcacagatggcatgcatgggctgtgaattgctgcatggattgcgtgcatgggctgtgtgaattgctgcacggatcgcgtgcacgggctgcgtgaattgcacggatcacatgcacgaactgaattgctgcatggacgcgtgcaggggctgtgtgaattgcacggatcgcatgcacaaactgtgaattgctgcatggacgcgtgcagggactgtgtgaattgctgcacagatggcgtgcatgggctgtgaattgctgcatggatcacgtgcctgtgctgtgtgaattgctacacagattatgtgcacgggctgtgaattgctgcatggatcacctgcacaggccgtgaattggtgcatggattgcgtgcatgggctgtgtgaattgcagcacagatatcatttacttatagacacagttggttcccatatcgcacacccatgtggctgacctacaagtgagccaggcccagaggctgaggagcaggggttcacagtggtccctgactgctctctctgcaggtccgccgggtgctgaagagccaggaggtgtatgaaaacttcctccgctgcatcgcactcttcaaccaggagctggtgtctggctctgagctcctgcagctcgtcagcccatttctggggtgagcagctgacttcccagggctccctaggggggttctgttcctgtcaactccatctacttggtttttagttactgtttttgagcaatgattgtgcttttctaaaatcctgtttattaattgacgtgattgatataattattgattcccatgcatttgtaaggagcaatacaccacctgggtaccctccagctggttcctttaccagtaacatctgtagtcagtatcctcaccagaatacagtgggtcctcgagtaatgccttttcatttaacactgttttaacaccgatgagaaaagaagacattcatttctggtctgagtggagtttgcacgttctccccatgtctgcgtggattttctcccacatcccaaagatgtgcatgttaggttaagtctaggttaagcggtgagtctccgtggtcccagcctgagtgagtgtggcggggtgagcgccctgcagtggggtggcgtcctgtccagggtgggtgccccactggtgctctgagctgctgggatagggtccggccacccaagatcctgaactggaataattgggtaaattgttattttacttgtttttactcatctttcttatctgtatgtgtggcttgcatttatttcagtgtttaatattagaagtgttttggtctctctttagaaatttggtgattgttttgtgaccaaaaatacgccgtaggaacgtcattcttgtttatgtgtcaattagcttgtggcaaaattggttttgttacacatcttttcaacttaaagacacagctttctaacacctgttgatgatgttgagtgaggacttactgtactgactctcacacaacccccgttctttccagactctccgtgttcctcatacacgtctggtgtgtgtgtttttatacagctttctcactgtggagggttgtgcgtccgccacagtgaagatactgaacggctccaggactgtcaagttctggccttgaccttttatctccatcccaaaaccctgcctcagccggagtctgttccaaacccctggcaactacttatctgttctctagacaatgttacagtaatggaactgtacaggaggaaccctctgggagaaaccttcccccccccccccccagcaaaattccctggagattcacctgataaatacttttaaaaattctaacacttgggccgggtgcggtggctcgtgtgtaatcccagcactttgggaggccgaggtgagcagattgcctgaggtcaggagttggagacaagcctggccaacatggtggaactccatctctactaaaaatacaaaaattagccgggcgtggtggcaggcgcctgtaatcccagctacttgggaggctgaggcaggagaatcgcttgaacccaggaggcggaggttgcagtgagctgagatcacgccattgtactccagcctgggtggcgacaagagcaagactttgtctcaaaaacaaaacaaaacaaaaaaataattctaacccttgggtcgggcttgggttaggtgcggtggctcacacctgtaatcccaacactttgggaggccgaggtgggtggatcacttgatgtcaggaattagagaccagtctgggcaacatggccaaaccctgtctctaccaaaaaatataaaaattcgccgggggtggtggcacacgcctgttgtcccagctacttaggaggctgagctagaaggatagcttgagccagggaggtcaaggctgcagtgagctgtgatcacgccactgtcctctagcctgggtgacagagtgagaccctgtatccaaaaaatatatgtatatatattatacctctgctgcacaaagagaagcctcattagcaggtcaggtctaagagtagcttctaacctctggtggccaggtcagcctcaggaaggggctgggactgagtggaggggcctggaaacaactgcgcacactcgtatccattctcgggctcacaggagtgtgcgcggtaggagtaggcgggcctgtgagtgctgagacctgggagccagctggggccagtgttgcttcctgcacatcagccctgtgactagggtgagtcacttgggcagtctgagcctctgtttccttgctgtaaaatggggatagtaaatgtaccgacctatgtggggttcctgagagctgcaggtgggcgctacctgcagggcccttcaaatacaatagaatctcacaaataaaaggaaaagacgattttttcggcagaaggaaatgatgtaagtcacaaacttggatctttcctaaagaatcgaagagcatggagaaaaatacacgtgaagatttttttttttttcaagacagagtcttgctctgttgcccaggctggagtgcagtggcgcgatcttggctcactgcaacctccacctcccaggttcaagtgactctcctgcctcatcctcctgagtagctgggattacagatgtgtgccaccatacttggctaatttttgtatttttagtagagatggggttttgccatgttggccaggctggtctcgaactcctgacctcaagcagtctgcctgcctcagtctcccaacgtgctgagattatgggcgtgagccaccatgcctggccatgattcttttttttaatggttcttgcacatggtgggtgcacatattaacatgatcagtccattcagtccttagcccttttcccatttaccccagggatagtagttgacagcacttgtggctgtagcgttcaccccaagataactttgccatgaagcatctcatttttattattatttttgcattgctgtcatatatcaactttggaaataaaagacatcattttatgtatagcatcctgtttttagtagtgatatttccagttacaaaatatagtaattcttgatcactgaaaatgtcaaatcttggaaaatgtagcattcctacacttgatgttaacattgttctcaaacagttgttggccaaagattcatttgatgaatctgactgttccaaaatagacgattctggtgattcagacgattctgatgttctgtttagaaataactccaagaacagtttttatattttactttcacattgaaaatcagtcagatttgcttcagcctcaaagagtgtgtttatgtaaaattaaatgagcgctggcagcaagctggacttttttttttgttctaaatgggaaaaagttgaatcaaccctggggacaggtgctgtgtgagcccttttgcattaacttaaaaaaaatatgtgtgtgtgtgtgtgtgtgtgtgtgtgtgtgtgtgtatatatacacataaacatttttctaatgtaaaataaagcacagatccaagaaaccacatggccaacaaatggcttgaatctttattaagcagtcacccatgtgcccaccacccacatcaaaaatagactccaggagcacccccgcataccattccagtccctgcccctcactgtgagagtgtcctgacttcaggagtgaccgccacctgcactaatgacggcacagccacccaggtgggcatcgccaaatacatgactcagtctcacccccatctgggttgggtttgctttgctttgcttcttttctcttctcttttcttttcttttcttttctttttttgagacggagtctaactctgtcacccaggctggagtgcaatggtgcgatctcagctcactgcaacctctgtctcccaggttcaagtgattatcctgcctcagcctctcgagtagctgggactacaggtgcctgtgaccacacccagctactttttgtattttgagtagagacagagtttcgccatgttggtcaggctggtctcaaactcctggcctcaagtgatccgcctgcctcagcctctcaaaatgctgggattgcaagtgtgagccacggcgcccaggccctgggttttgttttctaatacatctcgtaagtctcctttcacctctgattccctccgattctagtccttactatttttgtcctgatgcccctctgcctatccctgtccctgttatttctgtgatattagcctcccaggtttgctcattcatttggggttacacaggaggatcaccacagcatttctcaccttttataagaagtggcccaggatagctgcttgattacagccttgattcctccctagtcacggcctcagagtgatgaactgctttcatatcatcttcccaaggggaccaattaggttgtttcctttgtttttttttagcatcttaatgaattcatggacttaaaatatatttgatgcgtttcaataccgtttctagtccttttaaaggtgaggggccaggcgtggtggctcatgcctataatcccagtactttgggaggccgagggggaaggatcacttgcatccaggagtttaagaccaaggccgggcctggtggctcacgcctgtaatcctagcactatgggaggctgaggcgggtggatcacctgaggtcaggagttcaagaccagcgtaaccaatatggtgaaaccccttctctactaaaaataaaaaaattagccagacatggtgacctgtgcctgtagtcccagctacttgggaggctgagacaggagaattgattgaacccaggaagcagaggttgcaatgagcaaagattgtaccactgcactctagcctgggcaacagagcaagctgtctcaaaaaaacgaaaacaaaaaaaaatgaccagcctgggcaacatagtgagacctcgtcagaaactagccagaagtggtggcgtgtacctgtacctactttggaggttgaggtggctggatcgcttgagttttcgaggcagaggttgcagtgagccctgatctcaccactgcactcagcctgggtaacagagtgagaacctgtctcaaaaaaaaataaggaagctgaggctcaggtcgaacccctctaacttactctaggacaagcactcataggtgagcttagcgtgctgttaggcggcagccagggtgctccagccccaaagccagccctttgcatgttctctgccttctgggcacagtggctgctgggcttcggtgtgtatttttttttttaactcagcatttcttggaagtgtttcagcatcagatgtgaacccatgtcctcatttttaagcaactgcaccgcttttccttcccttaccagggtctctaacaatggacatttgtctctagtcctccctgtaagtggtgttgacagcaaatgctcctgagtctgcgaccctcatgggtcaagctgagcccatcagaaggcctttccctggtggtctcaggcatgcacgtgttggggtgatcttttcagtgggttttctttcttgggctgctgaaggtctgtaaacgccctgaagaacagcccagagcaggatggtgttactctagtctcagccaaaacggggactcctggggtctgtttgtgacgtgggtggtgggcacacggctgggctttttctgtggatgtggaatgcacattcaccttgagttgcctccactgggcttagaatccagcactctctgagcctgggtcccacctgggaaaaggggcccccaggggctgtgtgtggagctggtgttggcacctgggtccagcgggcacgtgaccaccccgggttggaattgggactctgcttcctactagccaagcgagcctcagtgtctttgtaaaatggccatacctccctcctgggtttatcaggaggttagaggggaagacagaaggaacatgaaaggtgagaatctgaaaggcaaggtgctgaacagatgggcagtgccggagcacagtcagctgttcttgtttccatgtttcagcagtagagactcgtatggggaagggcgtttggggaagggtctgtatggagcaaggtccagaattgaagcgggcctctgcgtgtgcttgacacgaggcctggttgggttaggagcgttcaccaccatgtggcgttcctccgcgtgttcaacctgcggtcaagtgctcagctgggctgggcagctgaacacggcccagggaactgcccctcgcagctggcagccgcgtggcagccagggtggatcgggttgagcattcccttcagagcagtcacgatttgcgtttatcccagcagtagcctcaggcatctctgcagcttttttgttggtctctttccttcctacgtttccatcggcttgtgggttttccttgtgagcagggttggcatagggttcttaaatacggggaacgacggagcccacatcaatgagggggacgtcgttatgcgagggtgggctgggtggctaggtcacagcaggattgtggcaccagcagtcaaagtaactgcaacttttttttttttttttttttttgagacggagtctcgctctgtcgcccaggctggagtgcagtggcgtgatctcggctcactgcaacctctgcctcctgggttcacgccattctcctgcctcagcctctcccagtagctgggactacaggcgcccgccaccacgcccagctaattttttttttgtatttttagtagagacggggtttcaccgtggtctcgatctcctgacctcgtgatccgcccgcctcggcctcccaaagttctgggattacaagcatgagccactgcgcctggccataactgcaacttttttggtaggatctgatgttactgcttagagacggggtcctgctctgttgcccaggctggtctcaaactcttgagctgaagtgatcttcccgccttggcctcctgagtagctgggattccaggtacacaccaccaggtctgatactattttaaacagaaatccaggtggcattgtagggtcatttgcattaaagccttcctgttgtcgaccacagccatgacattatgactttcaagcttgtgtccagagaggggttcacagagagaagtctccctcatgagaggaagactgtggatcagagataggcaaacttgatctctgaggggccagatgggctttgtggaaatgactcaaacccctcttgtgcaggcagccacaggcagtgcgtacacaagtggatgtgactgcaggccagtgaaactttatttacaatgggatggctaggcatggtggctcacgcctgtcaccccagtactttgggaggttgaggtgaaaggatcacttgaggccaggagttcaagaccagcttgggcaacatagcaagaccccatctctacaaaaaaatttttaaattggccctgcatggtggctcacacttgtaatcccagcactttgggaggccgaggcgggtgaatcaccggaggtcaggagtttgagaccagcctggccaacatggggaaaccccgtctctactaaacatacaaaaattagccgggcatggtggtgcatgcctgtagtcccagctactcagaaagctgagacaggagaattgcttgaacccgggaggtggaggttgaagtgagccgagattgtgccattgcaccccagcctgggcgacaagagtgaaactctgtctcaaaaaaaaaaaaaaaaaaaaatttagccgggtgtggtggcacatgcctgtggtcccagctactgaggaggctgcggtgggaggatctcttgagcccacgagtttgaggttgcagtaagctgagatcatgccactgcccttgagcctgggcaacagagtaagacactatctctaaaaagaaaataccaaaccaaacaaaacacaggcagtgtgcagactggctgtggcttgccactccctggcctgaagcctggcctcttccagtcagggaacatcaggggttccagcttctgccagtttaagtcatcttttctggtgtatttcaaagccttactgtgagtatgggattaataggcacaggaagggacctggtgtgtgacagatgggtgggaggcccattcattcacacaccccgggacttgcagtgacttcctgtgtattggattcttccgcctctcattcgcatccatgatgttgaattctgactctgtttaacttgtaatgtccacatgaagccattctaaaatctccagatccctctcagaaggccctggggatgaccagttaccatgtgtctttatctttgaaggaaatttccagaactctttgcacagttcaagtccttcctgggggtaaaagagctgtccttcgcgccacccatgagcgacagatccggggacgggataagccgggaaattgattatgcatcctgcaagcgcataggatccagctaccgggcactccccaaaacctaccagcagcccaagtgcagtgggaggacagccatctgcaaggaggtagcgctccctggggctcaaatgttcgttgacatggtgcatcccccacccctccccagcaaacacccgatacccccgttatgaatgaaatgctgtgtgctcagccctcctgaatgttgggttatgggtggtgctgggatgtggcccggcaaaaccacctgagcagagacaacagtgttgtaccctgctggtagttttggcaaaacacagagtgccagggataacgtggagttcggcttattcatctgttatttgacttaggtttattgctgccatgattctgctctgtcccgggctcactgacctcagtgtgtttctgtttagcttgaccattggacacttctccagggttcgtggacagacgattactgcatgtccaagttcaagaatacctgctggattccaggatatagtgcaggggtcagcaaactctggcccacgggccctggcccgctgcccgtgtttgtaaataaagttttactgtcacacagacacaaccattcctttacatattgcctgtggctgcttttctcaccacaaaggcagagttgagtattcatctgggatggcctgcaaaatctgagatggttgctgtctgaccctttgcagagagaatttaccaatgtctgaaatgaaatcggccctccggatctgcaagttcctcatctgtggtttcaactaaccatggattgaaaatacgtggggaaagagaaaccaaaaaatgacaatacagcaataaagcgtaatccacattttaagaatgcagtgtaacaatgatctacacagcatttacattgcattaggtataagtattctagagatgattttgcataggatatatgcaaataggattccattggacatcagggacttgagtatctgtggatttgggtcttcaggggtggttctggaaccaatctcccaggataccaagggagtgtccacttgaccaaagtcatgtttttccttaaaaactttatgcaccttcccatttgtataaggcagttggtattatgtatcaggatggtattatgtatcttggtactttctacactggctaacagtaaatcttggctcctggggcatgcagcgtcattcacggcatttcctcttggtgcaggtactgaacgacacctgggtctccttcccttcctggtctgaggactccacgttcgtcagctccaagaagacaccgtacgaggagcagcttcaccgctgtgaggacgagcgcttcgaggtgtgtgtgctgctgtggccgggtcccccggcatgtgcctgttccccttctccatgggacatgcatcctgatcctcctccactgccccagtctcgtttggaggagcaggaattgcagcacattccaacagctcctggaagcttcctgccgggtcttgctggcctttgggctggctaccagatggcacttttctttctgtttaaaaattttgtttgggctgggcgtagtggcagacacctgtaatcccaacactttgggaggccaagacaggtggatcatttaagctcaggagtttgagaccagcctgggcaacatggcgaaaccccatctctaccaaaaatacaaaaattagccgggcgtggtggcgggcgcctgtaatcccagctactcgagaggcagaagcagtagaattgcttgagccagagaggccgaggctgcagtgagccgagatcacaccactgcactccaccctggacaacagaatgagaccctgtctcctaaaaagtttctttaatgtaaaaattaaatttatttttattttatttatttatttattttgcttgctctgtttcccaggctggaagtgcagtggcgtaatcatggatcgctgcagccttgacctcccaggctcaaatgatcctcccacctcagcctcctgagtaactggaaccacaagtccatactaccatgcccaagttgttttttttactttttttgtagacatgaagtctcactgtgttcccgaggctggtctcacactcctggcctcaagcgatcctcccaccttggccttccaaagtgctgagattaaaggaatgagccaccacacctggctaatttttttttcctttttttagagacagggtctgtattgcccaggctacattaatttttgtaattaaaagttttattggctgggcacgatggctcacgcctgtaatccctgcactttgggaggctgaggtgggaggactgcttgaggccaggagttcaagaccaacctgggcaacaaagcaagagcccatctatacaaaaaaaaaatttttttttttttttgagacagagtttcactctgtcgcccaggctggagtccagtggcatgatcttggctcactgcaacctccacctcctgggttcaagcgattctcctgccttagcctcctgaatagctgggattacaggcacaccaccattcctggctaatttttttatttttagtagagacggggtttcactatgttggtcgggctggtctcgaactcgtgaccttgtgatccgcccatctcagcctcccaaagtgccaggattacaggcgtgagccaccgtgcccggccataaatttttttaattagccaggcatggtggtgcacacctatattcctagctacgtgggaggctaaggtgggaggattgtttgagcccaggaggttgaggctgcagtgagctttgattgtgccacagcactcaagtctgggtgacagagcaagaccctatctcttaaatacacacaccccccccccaaaaaaatcctctggtctctgaggtcccaggctcctctctgaggcctcttgagttccccagtggctgaccccgtcctgccttcctttccatagttagacgttgtcctggagacgaacctggccacaatccgtgtgttggaaagtgtgcagaagaagctgtctcggatggcgccggaagaccaggagaagttccggctggacgactccctgggaggcacgtcggaggtgatccagcgccgtgccatttatcgcatctatggcgacaaggccccggagatcatcgagagcctcaagaagaaccctgtcaccgctgtccccgttgtcctgaaaaggtgccctgtggcgtcccgacttcccttccccttccccttcccccttccctcccctcccctcccctcccctccccactgcagggagcccttggagagctcattagtgctgtttgtcaacaggtgtcatctccaggggtggtctctgaggcctaagggtgccttcctgtatttcccagtctcccactcctgagaggagagcactgtgaccttctaggactttccaccttgcacataatacatctagacatctaaataactgctttaagagtcagatgcgaccactacactgtggcttgcattttatttaatgctgcatttcggatgccgtccggcgctagttaacaggcatttatcaagtggtcactttcaggcaggtgcagtgcttggccctgggattatgcagctgagtgaggcagacccagtccctctcttgggactcacagctgagcaggggacctgagtggttgagccaacagccatgcggagagtgctgggtgccagggaggaggtggaggaaccgggaagccggccacattggctctgtaaggccatcacgccctccctctgacgtgcacagagcccactgcacagactaggctgggagctggctgggcctgggtcctggacccccagtcaagtcccagaggaagacaggccagccctgggatgcttcagggaggatgccctggcttgtccctggtgctgacctctcttccccccgcagactgaaggccaaggaagaggagtggcgggaggcccagcagggcttcaacaagatctggcgggagcagtatgagaaggcgtacctcaagtcccttgaccaccaggctgtgaacttcaagcagaacgacaccaaggccctgcgctccaagagcttgctcaacgagatcgagagcgtctacgacgaggtaaagccttccctagccctgccggccggtgggggtggggtcctggctctcccgaccgccgggtctgtgcctctgtttccctggtggttaggcagggtagtggcattgccctttcagggctgtgttgaggcgagggttcatgtctctgtgatgcccagcctgtggcctgccctaggagaaccagcaactctgccattgtctatctgtttgtttgtttggagacagagtctcgctgtgttacacaggctggagtgcagtggtgtgatctcagctcactgtaacctcagcctcctgggttcaagtgattcttctgcctcagcctcctgagtggctgggactacaggcgcacaccaccacacccagctaatttttatatttttagtagagatgggttttcaccatgttggccaggctggtcttgaactcctgacctcgtgatccacccacctcagcctcccaaagtgctgggattacatgcgtaagccaccgctcctggccgactctgccattgtctagcgaagtctccgtccctcccgtggggcagtgatggactttggcttaggtagtgggtggcagcagccttcatttctttcttgccgactgtgccaggcaccggtgttagcaacacagaaagagtaatgcatcatctgacctcactcctgaacctgactctgctgcggcattattctgattttaccagtggggaaactgaggcacaagaggttgcatttgcctgggctggtcgcagggggccagggctctgagtcattgggttcgaggctttcggctgcatgtcctcactgcaggctcacaaggcctgagtcatagaaccaaggccagcggggccctcaggttgccaggagctgggcctgttagtagctgtgtgtagggagtgcctgcttgcaggatcctgaggtgggaagcttggcagggtgccgggcgtggtgatagccagctgtcgggaaggtccttggacactctgaggaggtggcttaggagggcacactactccccaggcagtgcccagatcatggcacgggctgcgttatcagcctggtgcccacctgggcagggggtgttgcctcacctgatttggtttcttgctcctgtcactgcacagtgagcggtcgctccttcttttacaacacagaaacggaatccacaggagccgggctgctggcccaaggcctctcccagagcctgtgggactgtggggacccccttccctcccacctcccttcccgtgggccaccctcgccccaggcccacccacaaccactctggcttcctcactctagtcctcggcgatcctcaagcccaagaccccgtataggttctgtgggtctgtggtgtctgcaaagtgcagatgatgaagtagccctggaaatccaccaatgcgaccctgagttcctggatccctccctggggctggggctgacaaagggaggggcaccaaggttcatatgcagatctctgcacatgcaggtccttgatgaattccaaagtcagaaccccattccatcacgtgatttacaaagcatggttacagatcatggacatggggaccctgcttcagaggggactgtaaaggaattttcagagtgtttatggcataaatgagacctgggggacttaggaagcagtcagagggcgatggtcacactgaagagcccagagcagggctgagcgtgcagactcctaggaaccaggtcagtgtgcttggccctaccagcctctaagccgccttgcaggggaggaggaagggaaacctcaggctgctaggagacccggtccttccctcgggagcctgcagagatggcatccacgctcattttccccaagagccctgctgcgtctgcctccctgccttggactgagggggttggggctgcccagcagaggccctgggtgccaggacagtggtgtgggaggctggaggaaggggtgattgtctaatggtgtgagggaatgaaagtcatgatctagataaagaccaaggggaggggtgagcctgggacagggttttccagggagtgagagcagatgggcatgtgcaaaggccctgcacacgcaggagggagcttggcgcggtgaggctggaggagctgtggaggggcacatcaggggccggcgtcttctgagcagcctgggaaagcctgaagggcattagttggggtgaccatgctcctgtgggccaagtcaccctggacccagtgaggagagtggttggagcaggctggtgggagctggtgggagggctggtgacatgatggtggtagcaagcacgtgcaggggctggcggggacagcagcggaggcgggggcttggtgacgatgggcgtgcaggtcttcagatgtgagcagttgcaggccttccgggtagtagatggagggcagaggcagagaggtcacggctcaccctttgcctccttgacttcatcgatagcatggtgtgggcagccccggtcgagctggaatcaggcgccaccgttgctttcagtaggaggaggtcagcctcagaggcttctccatgctgagccacggggccccgttctgtcctggagctgggctgagcgacagacccaggcttgacgctgtcagaccccctgtgaaccccgccccacatctcagaatcctcttggctcctttgtctggggtcccgggatgacttgggtctgcctcactttcggagaggggaccaggagcacatggggctgcacaagaggttgaggcaagcgacctaccccccaggccctgctgcctcaccgatgttcgccacccatcctgctctgggcagcgctcatccaccttggtggcccagttaacagcgagtcgtgaatgggcactgggggtcctctgggtgctgggtggctttccacctaatggccgcccttccccccacagcaccaggagcagcactcggagggccgcagtgccccctctagcgagccgcacctcatctttgtgtacgaggaccggcagatcctggaggacgcagcagcgctcatcagctactacgtgaagcggcagccggccatccagaaggaggaccagggcaccatccaccagctgctgcaccagttcgtgcccagcctcttcttctctcagcagctggacctgggcgcctccgaggagtcagctgatgaggaccgggacagcccccaggggcagaccacagaccccagtgagcggaagaagccggcgccaggaccccacagtagccccccagaggagaagggggccttcggggatgccccggccactgagcagccacccctgccgcccccagccccgcacaagcccctggacgatgtctacagcctattttttgccaacaacaactggtacttcttcctgcgcctgcaccagaccctgtgctccaggctgctgaagatctaccgccaggcgcagaagcagcttctggagtatcggaccgagaaggagcgggagaagctgctgtgtgagggccgcagggagaagggcagcgaccccgccatggagctgcggctgaagcagcccagtaaggctccaaagcctgccgggaggccccggggggtgcctggggttaggggtcacagctcatgatctgacatgtcctgttacttttctttctggcttttcattttaagagaattctgtgatttcaaatgggaaattgcaaacaggaagttgccagcataagacagaggtctcacgtacccctcgcccaggctcccctggccgtggcacctgtcctgggtgtagcaccctctcctgactggggaacatttgtttctcatgggctttctcgtggagccgtcatggcccagctccacagtaccctttttctttctttttttttttttttgagatggagtcttgcgctgttgcgcaggctggagtatagtggcaggatctcggcccactgcaacctccacttcccaggttcaagtgattctcctgccttagcctcccaagtagctgggattacaggcgctcaccaccatgcctggctcattttttgtatttcttttttgaaatggagtcttgctctattgcccagcctggagcacagtggcatgatctcggctcactgcagcctccgcctcccaggttcaagcaattctctgcctcagcctctgagtagctgggattacaggcacccaccaccatgtccggttattttttttttgtatttttagtggagacgaggtttcaccatcttgaccaggctggtcttaaaactcctgaccttgtgatccacctgcctcgggcttccaaagtgatgggattacaggcatgagccaccgcgcccagcccaattttttgtatttttaatagagacaggatttcaccatgttggccaacctggtctcaaactcctgaactcaggtgatccgcctgcctcagcctccccaagtgctgggattacaggcatgggccaccatgcctggcctccacagcattctcgctgccatccctgggttgccggccagattaggcagcctcggagggtggcagtgaacaccagctactcgggtttcctggtgattcccacatttgccccaggggtggcaggtgagggctgttgggccccatgggggcatttgttggggctctgtcatgccagagtttggcctgcgtgactttgcgctctccaggaggcatatggatgaggcggtgtgtctccgcaggtgaagtggagctggaggagtactacccggccttcctggacatggtgcggagcctgctggagggcagcatcgaccccacgcagtacgaggacaccctacgcgagatgttcaccatccatgcctacgtgggcttcaccatggacaagctggtgcagaacattgcgcggcaggtgagccgggccggggtggggccggccctgaggacggcggaaatggctctaccatcatttcactccccgctcgggagggggcccgtggtcagcacagcaaacctatcctgttttttcttaattgagacaaaattcgcataacgtaaaattaaccattttgaagtgtacagtttggtaacatttggtacattcacaatattgtgcaaccaccacctctgtctagttccagaacatttcatctttccaaaaggagaccccatccccatcagcagccactgcccattcccctgccccgagcccctgacatccagtcaactgctttctgcctctgtatttccctcgtgcttcattcctttttatggctctgtaatactccattgcgtgggtagctacgttttgtttctatctcttggtggacatctgggctgtggctgccttatagagattgtgagcaatgctgctctgaacatttgtgtacaagtttttgttccgtgtccctgttgacaaacctttcttgaggttaaattgacaacatggaaaaaaccttaacccacttatcctgagggagggtgggaatagtgatttcatctgcgttggttttagtagtagcaaaaacccaggccccactgaatgtcaacacaaggaaactggtcacgtaaatataaacagcagacgtcccagacgagctgggtgtggttccaggacatgggtcctgcctggtttctgccagaatcattgttcatggtgacctccatttcctggtcaccaagtaaggctgttcatcataaagtggaaaaaaagctggaaaaaaaataatgccattactctcccacccagacacagccacgagaagcatttcagacaggacgtttccttccaggttttaaagactgcttaatggagctaaaatacccaagcagaaaagtccccaaatttgaagggggcagatggatgggcttttcatcaacagaacccctgcccctgtgtccccacccagccacctgccacccatggacacccacaaccctgatttctttttcttcttcttctttttttttttttgagacagagttttgctcttgtctcccaggctggagtacaatggcacaatctctgctcacagcaacctctgcctcctggtttcaagcaattctcctgcctcagcctcctgagtagctgagattacaggtgcgcaccaccacgcctggctaatttttgtatttttagtagagagggggtttcaccatgttgggcaggctggtctcgaactcctgacctcaggtgatccgcctcccttggcctcctaaagtgctgggattacaggcgtgagccaccgcaccggcatcacaaccctgatttctacagagaggtagatccctggcctcgagctgtgtgttaacagcagcacacagcgcccagccgcatcctgggagcgtcattctgtgagattcctgtgttgagatgaaccggccaaggattccgaggaacgacccccgattccgtccacctgtctcctgaggacaggcatgggcggtgccccgtgggtgtgtctgcggtggccgtctatgtacatttctgctgctgcccttggggtaaggcacagagaggtgtgtcccgctgatggcaactttccgtttcctgggtcactcgtaccagtgctgtgcgaggccgcactctgtgtcctccctggggctcaggggcgtctctccatcagctgggagttcaaatctcggtgggctcacgttgcatttccctgatggcaaatgtggctggggccctgtcctttcatggccgttgggacatcttttctcatggaaagctatccacggtgtttgcgcctgtttccgttgcgtctgccttgttggtgactgggaggatttctgtgtctggccatgaggacttagtgaaacccatagctgcgttctgacaccttcgcttcagccccctccactttccctccgtgtgcccgaaatgggtccctgcccatcaccatccacagcagtggccactccccaggtgagggaaacacgcacggggcagcctggagagaggacacccagggcccagcacatggtgttggggaagtgacgcaggggacgccagggggctggcagtctgtcccctccccccccccccaggctgggcacccctcatgggccatggcttcggggacagcaaccttgcttgtgacaccaggagattggaccagatggtttatggaaagcattgattaatgctttaaaaaaatcccccccttccataaacaactcctctagaacctgttaaaaacaaagcaatgaaaatggggctgtctggctggagctgtagtgagagccacatgctgccctgctgtcccagctgtggctgcaccacaccccagctgcatctccctgggccaggtgctcactgcgggcccctccacactgtttgtaacctgcctcgaggccatgtctggactctgcctccctttttcttaaaaattagcattgctgttttttagcagtagcagttggcattcagtgggcacttgctgtgtgccaggtactgtctgaaacctatgcgtgtccaggtgttattgtatccattcaacaaagctgcacatggaacccccaaggagtgtggtcccctgaccagggcctgggctgtgcaggcgggtgattcacacagccctgtctgccccacgatccctgctgtttccattccttccttcttcagtgcaaaggtaaaaggagtagcagtgtatttacagccaagcatttaggggaaaggaacagcctgcactcaggccaccttcagctcattcctgggtttgctttggaacatatttttccgtgtcttttctgtgtgtttctcacacccgggcagggtttgctggtctggcctggtctgttttgttcaggtctggtctggtctagttttggtctggtctggtctggtctagttttggtctggcctggtctggtctggtttggttttggtttggtctggtttggtctggtctggtctggctttggtctgatttggtttggttttggtttggtctgatttggtctggtctggttttggtctggtctcatctggtctggtgtggtttggttttgatttggtctgatttggtctgctctgatctggtctggtctggtctggtttggtttggttttgatttggtctgatttggtctggtctggtttggtgtggttttggtttggtctggtctggtctggttttggtctggtctggtctgatctgatctggcctggtttggtttggttttggtttggtctgatctggtctgtttggtctggtttggtttggttttagtctggtctggtctggttttggtatggtctaatctggtctagtttggttggttttggtttggtctggtttggtgtggtttggtctgatctgatctggtctggttttggtctggtctgatttgatttggtctggtttggtttggttttagtctggtctagtctggtctggtctggttttggtctggtctaatctggtctagtttggttggttttggtttggtctgatctgatctggtctggttttggtctggtctgatttgatttggtctggtttggtttggtttggttaggttttggtttggtctggtttggtctggtctggtctggttttggtctggtttggtttggttttggtttggtctggtctggtttagtttggtctgatctggtctggtctggtttggttttggtttggtctggtctggttttggtctggtttgggtctggtctggtctggtctgtttggtctggtctggtctggtctggtctgtctggtctggtttggtctggtctggtctggtctgtttggtctggtctggtctggttttggtctggtttgggtctggtctggtctggttttggtctggtttgggtctggtctggtttgggtctggtctggtttggtctggtctggtctgtttggtctggtctggtttggtctggtctggtctgtttggtctggtctggtttggtctggtctggtctgtttggtctggtctggttttggtctggtttgggtctggtctggtctggttttggtctggtttgggtctggtctggtttggtctggtctggtctgtttggtctggtctggtctgtttggtctggtctgtttggtctggtctggtctggtctggtctggtttggttttggtttggtctggtctggttttggtctggtttgggtctggtctggtctggtctgtttggtctggtctggtctggtctgtttggtctggtctggtctggtctggtctggtcggttcggtctggtctggtctggtttggtctggtctggtcggtttggtctggtctggtctgtttggtctggtctgtttggtctggtctggtctggtctggtctggtctgtttggtctggtctggtctgtttggtttggtctggtctggtctggtctgtttggtctggtctggtctggtctggtctggtctgtttggtctggtctgcccacagcctgtcaggattctggtctcttcatccctgtgtcatgcactctccatcctgatgtgtttctggcctttgtcgacttcctctgtgggtgaggtggggactcccgcaggaggcggggtggccgcaccacctgctttcctcccgccagctgcaccacctcgtgagcgatgacgtctgcctgaaggtggtggagctctacctgaacgagaagaagcggggtgccgctggtgggaacctgtcctcccgctgcgtccgcgctgctagggagaccagctaccagtggaaggctgagcgctgcatggccgacgagaactgcttcaaggtgagaggaggcctggggctgggaacacgccgggaggcccggccgctcactccgctctggactcagtcctgggtggaccctggttcagcggctgggacaccggccctgctgcagagcccatgaggtacctttgacctgcaggaagcatcagggctttgggagggtggcaaaggcgggaggcgggtggccttgcgagcctgcgctgtgccggctgggctgtgccggcagtggaggctgtcagcgttcctgctccgcaggtgatgttcctgcagcgcaaagggcaggtgatcatgaccatcgagctcctggacaccgaggaggcccagacggaggaccctgtggaggtccaggtgaggccctggccccagtctgtgccacgcataccagggagcgcctgagggcagcagcatggggctcccaccagccaagcgcaggccgcgcagcatccagagaccctccctctgcaggccacaggctctccttgaggcctggtgggtggggttgcctccctccctgctcccccaccaggctctcttctgtgccccctctccaaagagcagaccactcctcctgagcaagcggttgtgtcccagggcaggaggggaaccaagccacctctccctggcccccgactcccactcagggcatcccgtggctgtgacctctgcacctcttgtgtcagggctgcatcctgttcctaatccccagcagaggagccacctgggcccagctcccagtcacaatttttgcggggacagatgtttcctgctcacctcccgcatcctggtgacagtgaggcattgacccgtgtgtgtccccagggtggtcattggggcctgcagctcccggcacctgccaacaggtccagtgtgtgtgcacattactcagctaggccaaccccattcatttcctggggctaccaccacaatgaccacaaaccacgtggcttcaaacaacagaagtctattccctcaacgtcctggaggtcagcagtccacaaccacagtgtgggccgggcggtgctcctgccaaaggctctggggcggatccttcctgctcttccagcttccgggggcttctggcgctcctcagctgtggcctggttgtgtgagtcccgctgtcactgggtcctctgtcaagagctatagtctgttggggtctccgtcagggatcagagtcctctgcagcggctctcctcatgctctggcagtggggggcacagaacccctgtgagctcctgaactcagagtccagagtaagagtggccatagccctgctgtaggggcatcacgggctgtgtctctccctgtccccagcacctggctcggtacgtggagcagtatgtggggaccgagggcgcgtccagctcgcccactgagggcttcctcctgaaacctgtgttcctgcagaggtaagaggccctgagatgcatgctctgttccttccttcctgggcccagggagtgtcccctttgtcctgacgggggctggaccatggcacactgtctgggagcacttagtaggtgcctgctgtgtgctgaggcaggccctgcccttttgaggcttgtggtttgcagtggagggattagtaaccccaggacggtgaggtgtaggaggggcaaggccaaccccacgatgcgtcagtgggtgaagagtgaatgcccggactggagggagacgctgccagagctggtggggccaggccagaggcgggtggctgtggcaggaccctggaccacctcaggtcgggctaggatggcacctatgggaccagtgggggctgctggtgggtgttcagatctgggggcatttcttgttgcttccatttgctttctgtggacccctgggaggtagcacatcttctgatggtcccaggcctgggggtttcccagcctgcaaatcctcctcccacaatgccgagagccagagtccattccacctcctttcgcccccaggaacctcaagaagttccgccgccggtggcagagcgagcaggcgcgggccctgcgcggtgaggccaggagctcctggaagcggctggtgggcgtggagagcgcctgcgacgtggactgccgcttcaagctcagcactcacaagatggtgttcatcgtgaactccgaggactacatgtaccgtcgcgggaccctctgccgggccaagcaggtgccaggggaggcctgggctgccccgacatgcccctcctcaccccaagtcctggggccctgggggtccagccctcagctgccctgacacccggcctcttcaacaggtgcagcccctggtcctgctccgccaccaccagcactttgaggagtggcacagccgctggctggaggacaatgtgacggtggaggcggctagcctggtgcaggactggctgatgggtgaggaggacgaggacatggtaccctgcaagacgctgtgtgagacagtgcacgtgcacggcctgcccgtgacccgctaccgcgtgcagtacagccgccgcccggcctcgccctgacccgccctcatgggcaccgggcaggcgcctcacagagcacagacgtgccctcggccttggtcgtgtcggggccgttttcttgaacgacgtgagaggcatctcccagcccctctgctgccggacagcgcactccagggcaggacgccgcccccgtggctcccggtctcctgtgggcctgctgtgtgccaaacctgagctacctgcacccgagccctggggctcagccccaccacaggggcgggtggacgtgctggccgaggaacaagcaatcatgtttgcgtccccgtccgtcacatgtgccaaatccctggcaggcagatggctcctgccccatattcttgccgtgtcttggaaaagtcacaggtgacagccctcctgaggcccacactttggagggggtccatgtccaagagaccctgacaaggaaggagttgagccctgggtaggcttgcttgaaaagtgagtccttccagaatattctcagagctgccagaaacatcatctgagggtttgggcatcagctctgcctggctggtgttcaggccctcagtcactttggaagtgagaagaacccttcagccaaacctttgggatcccattttgaagtccagagctggagcaggcgggcagtgccctgggagaccccgctctggataagacacccaaccccaactccagcagctggactctgggcccacaaggggagggaccccagccagtattccctcagagccggcacgaccctgctgtggggcggcgggcccagtcgtgttcctgcagtgggcaccctaggcgtatgtgtatacacgcacagatatttattcctttcgcttttagtggttgttatttctgtagcagccaagtcctgcggctccctggggctgagatctccctttgtggaactccgagagccgccctgacagtcccagccgccacccaaggagccccatccgcccacccaccctgggacccacgcggccactccagggatcattgttgtccttttgtgaggggctgaggcgactgtcccatggaggcatccaaggctttctgtgccaagaatcccaagtgactggggctggggaccacttctccaggcctctctccccgaccatgagagcccctggccctggcccctgcacaccagtaggcccagaataaccgccacccttgccatcctgcaacagctggactcaagtttccaggaagtggagatgtgtttctagaagtttcctgtggaacctggaggctcctgatgcctttgactccaggctgggcgattccgatgctgacccgtcctcctgggctccccacccccgctccccaagtgtcacacaggcactttgtacacatcctggttttctaagaagggaacttgccatcaagattcctgtaccaggcccacggccgtctcgggcagagccacctgggccccgggtgcagccggagaccccgccgagcccctcctcccagtattcccatccccgcatgcttctagggagcgcctcttttccgttcttgaggaatttctgttctggggcttgtccttcctttgcagctgttttgaatgtagttttccttttctatttatttgcacattaaagttaataattgaatattgacatcaagccgtgagggtgtgttggtcttcctgtgagagccttgctgacttcctgccaccaggtcagtgggctggacccatgagagcaaggggtggctgggtgtgcctacctgggaccaggggagtcgaagcccctccttgaaccaagatcatctcacaccctgcacctgccccgccacgacatgggagtgtcttctagaatattctttccccattccatttgcacatttagtgggaattagaagcgtctccttcgcccgagtgtctctcatgcagaacccaatttaaagatcatggtgtttgctctaaggtgtttgttctaagcttcccatgcccaacctatccgtccaggcccatgcctgcccacccaccccacacgaccaccctctgtactccttggggccccacccacttcctggctttcaccatcattttctcctcatctcctgccccctgtctgcatcccaagctccacacctgcttccgggtagcagaagccccagctctgctgtgtcccctggctgacatacctggagggttccaaggcagaagtggccagcccctccccctcagtatgggctcctccatcctctgtaggggaggggccatagcttcctcccagtgacccatgtgctccctgtacacccaagcgtctctggcagttctgaccacacccccaccggagggtcagggctcccagggagcgtggcaagccagaccggaggccgccctgtttccttctgccttgatcccatggctggggatgcccagggtcctctgtgggcccccagactggctttccttggtcagaagtgctgcaggggctgggaaaggctgtgctggtcccaggagagcagacaaagagcagatctccgaggtggccctgccctgaggggtcccctgccctcaagtagggcccatggccttgatgaggtgatatgacatgagttgagagaggttcctcactggccctgaagatgtctccgctgtgctggggaggggaccctgtggcaagggacagagagtggcctccaagagccaagggggacctcagagccaccactaccaccaggacccaaattctgcccaagtccacttgggcccagaaaaggcccccgagcagcagataaggacacagcccagctgacaccttgatctcagcctcatttgaccctgaaccaaagacccagcctcccaggctggacccctgacccacggaaacaaaaggtcatagaggcgtgtggctgtgagccacattcattatccagagatagatacagcagcattaataaagccgctgcatgtccagcacctccccttccacctccgtcaagtacggggaggtggctgagggtctcaggaacccctactgaggggggaaatgaaagaaaaaagaaaaaattaaaaagagaattaagcttttcctgtattaggctgacttgtctcagaggcagcaacaggcacagcccagacccaggaaaagtcttaataatactaagaagccaagacacaaaggaatgtgctctggagcctctcccagcactccctcaacatagggagaagaaaaacaaattttcctttgtttcatggtatgagtttatagattcctgctctctacacctagtgacttcaaatattctgttttatcagcagtggagtgaaggtcataaactgtctgagcagcctgagatagagccacctgggtgccatagtgatggccatggaataagccatgctaagcactagggcaaacctacataatggccatctgagttgcacagcaacggtcatgtctaatcctgagttatgagcctgttataatttgattaactgtctttgtcctgcctctgtatccctgctttcacgccactgtaagcctgcttcaagctaacccacccctttttaaaagtgtgtttaagtcaagtgctgtctttattctaggcccagtttttagacgttgagtccagtgggtctgagtgcactcaataaagatcctcctgtatacaccccaaggtctctcttttcctcctgtttccacaacactacatgtgatgctgacagagggtgctgggacaggggcttccagtggggccccatgaacatttattctgttgctagtgaggtgtttgtctcactggcttttgcaacatataaccagtgcttcccgcctgatgtcctcacttgctgagaatgaggctaactactccaaacagcaaactgaataccatccagcaatcacgttcctttgtatttgcccaaaggaactgaaaacttgggtccacacaaaaacctgcacaagagatatacgcagccttattcaccagtgcccaaactcagacacaaccaaggcgtccttcagcgggcaaacggataaaccatgtcacctccagacaacaggatataaaacgaaatgagccatgaagctgtgaagacatgaaggggccaggcgtggtggctcacacctataattccagcaccttgggaggctgaggcaggaggatcacctgaggtcaggagtttgagaccagcctggccaacatggtgaaaccctgtctgtcctgaaaatacaaaaattggtcaggcgtggtggcacgcgcctgtaatcccagctattccagaggctgaggcaggagaattgcttgaacctgggaggcagaggttgcagtgagccgagatcacgctactgcactccggcctgggtgacagagcgagagtctgtctcaaaaaataaaagacacaaaggggcctcaaatgcatctaactaagtgaaagaagccagcctggaaaggctgcacactgcatgattccaactatagaacactctggaaaaggcaaaagtatagaggcagtgaaaagatctgtggttgccagggggcagatgggaggaagtaatccataggtggaggtgggaggatttttagggcagtgacgcaactgtgcgacactatggtcaatggtggacatatcatgacacatatgtccaaacccatggaaggtacagtgccaaaagtgaacccccatggaaacgcggggttccagaagacagagccgtgtccatgcagctttgtccgttgcaacaaaggcaccgcttttggtaaaggacatagatagcgggggaggcttgcatgtgtggggtggggttacatggggactctgtaccttctgctgaatttcactgtgaacctaaaactgctctaaaaaataaagttttttttaaaaaagcaatttgacccaaagtcagtctcaggaggccagggggtgggggacagaacaggccagggcaggaacttgcagggacgggtgcaggcaggctgaggtctcaggaatgtgtctgcacctctgtggtttcccttctcttcttcccttctggggacctttgcaatctgggctggctgctgggtcccgcctaggtttcagattctgccccaccctgaggttggccagtcccttctctctgtggctctgggagtggagcctcagcccttggtacagtggagcaaacaaactctgatttggggccccagagaggaagcgctgggaatccaggggttggacaggctggaccccaagccctgcttccaccatggctgtccgtgcgaccctgggagtgactgtcagtcctggtgagacagggtcacagcacctgcctctcatggccattcaactgggttaatgtccctgcccagccagggaatgagaggaggtggcaccatgtttgctgctggagtgtaatggcgcgatcttggctcactgcaatctccacctcccgggttcaagcgattctcctgtctcagcctcctgagtaactgggattactggcacgcaccaccacgcccagctaatttttgtatttttagtagagacagggtttcatcaaattggtcaagctggtcttgaactcccaacctcaggcgatccgcctgcctcggcctcccaaactgctgggattacaggcatgagccaccgcacccagcctgcccatgtggcttctaacttgttccctgaccctgaccttttgctggaggcagtgaaggcaggagagagtggaggccacatccaggagcttccagggacctgaggggttggaggacaatgaaatccaggacacgccactgacttgcgcctgtctgccaatttttccccatttaaaaaagttatttaaagggccaggtgcagtggcttacacctgtaatcccagcactttgggaggctgaggcaggcggctcgcctgaggccagaagttcgaggtggtgaaactccacctctactaaaaatacaaaaattagccgggtgtggtggcatgcacctgtaatcctagctactcgggaggctgaggcaggagaatcacttgcaccctggaggtggaggttgcagtgagcagagactgtgtcactgcactccagcctgagcaacagagtgagactctgtctccaaaaaaaaaaaaaaaaaaaaaaaaagttatttgaattgtggtcaagtttatcttaatgatttttaagtgttcagctcagtggcagtaagtacattcatattgtcaccatccatctccagaactttttttttttggagacagagtctcgctctgtcaccaaggctagagggcagtggcacagtctctgctcactgcaacctctgcctcccaggcgcaagtgatcctcccacctcagcctctcgagtagcagggaccacaggtgtatactaccacactcggctaatttttgtatttttttgtagagatggttgggggggtgtctcactttgtggcccaggctggcctcgaacccctgacctcaagtgatccacctgccttggcctcccaaagtgcagggattacaggcgtgaaccacctcacccagcccagaactcttccatcttgcaaaactgaaacactgtggccttaagcactcactccccaatccccctcccccagcctctggcaccccccaacccattctacttcctgtctctatggaggtgaccactccagggacctcccatgagtggaatgactcaggatttgtctttccgtgaccggcttatttccctcagcataatgtcctcaagattcatccacaatgtagcatatgtcagaattcccttactttttaaggctgcctttttttttttttttttttttttttttggcagagtttcactctgtcacccgggtgggagtgcagtggtgcaatcacagctcactgcagcctcgacctcctgggctcaagcaatcttcccacctcattttttgattttttgtagagacaagatttcactatgttgcccaggctggtcttgaactcctgagcccaagcgatccctctacctcggcctcccaaagcactgggattacaggcatgagccaccactctgaaacagcccggcctggctgtctgccctttttaagaaaataagattttggccgggcgtggtggctcacgcctgtaatcccagcacttcgggaggctgaggcgggtggatcacctgaggtcaggagtttgagacctgcctggccaacatgatgaaacctcgtttctaccaaaaatacaaaaattagccaggcatggtggcgggtgcctataatcccagctgctcgggaggctgaagcaggagaatcgcttgaatccaggaagcagaggttgcagtgagccgaaatggcaccattgcaccttcagcctgggcaacaagagcgaacctccatctctaaataaaaaatattttggccaggtgcagtggctcatgcctataatcctagtgctttgggaggctgaggcaggtgggtcacctgaggtcaggagtttgagaccagcctggccaacacgacgaaactccgcctctactaaaaatacacaaaattagccgggcatagtggcaggcgcctgtaatccctgctgctggggaggctgaggcaggagaattgcttgaatccaggaagcagaggttgcagtgagctgagattgcgccattgcactccagcctgggcgactgatcgagactccatcttaaaaaaaaaaaaagtttttatggaaagtaacacagtgcacagaaaactccaacagtacaaaacagacacatggtttcctctcctccaaagctgtcgcgcccagcgtcctccgggaagtacctgggcagtgtcgcctgggtacagcttgtgcctgacaggggcaatgtcatcgtcacctctgcttgctggggttcccccgacagcctgtgctgccgtgttgttcccggggaggggctgttggcgggcacctccctgctttgtgctgctgtgtggatatcctcccaaggacatcttcctgtgcgtgtgtctggcagaaattcctagacatggaacccttgagtataagggcatgtgcgtcactatgttttttttttttttttgagacgcgtttcactcttgttgcccaggctggagtgaggctggagtgcaatgatgcaatctcggctcactgcaacctttgcctcccatgttcaagtgattctcctgcctcgcctcccgagcagctgggattacaggcatatgtcaccatgcctagctaattttgtatttttactagagatggggtttctccatgttagtcaggctggtctcgaactcccaacctcaggtgatccacccgcctctgcctcccaaagtgctgggattacaggtgtgagccactgtgcctggcttttttttttttttttttttttttttgagtcggagtctcgctccgttgcccaggctggagtgcagtggtgtgatctcagctcactgtaacccctgcgtcctgggttcaagagattttcctgcctcagcctcctgaggagctaggactacagacgtgcgccaccatgtctggctaatttttgtatttttagtagagacgggttttcaccatgttggccaggacggtctcgatctcttgacctcgtgatccacccacctggcctcccaaagtgctgggattacaggcgtgagccattgcgcccggtcgtgcatcactattttgatgcatcatcttcaaaccaccctgccccagcatcactggactgccggtgtgcccagcctcccctgcacagcttcccactctgctcacagagaagacggtggaggggggagcccaggcgtgggttttccgtgtgctgagggtgtcctcagccacctttttccccaagtcattgacgtgaagctgattttctcattggtggccatggaaactgcccagaaatgggagcagggcctctgagaccctgccccagctagactctctctccaggcttcagtgtctcctcctggagctgggtgttgactctgtccaagactctgctcagtcacttcctggctgatccccgagtgctcaagtgtgtgatgagattagggctcccccaggcaggaaacggccacattggacccctccctcccccatccctagttcattttattttccccaatcctcatggctcccaactaggccctcctgctcccagacccccccaagccctgtcccccatcccctgtagcccagcgctgagcacactggggccagaaccacccataccagactcccccagggcacgacgggttgaggcctctctgaggcagggagggacaacactgaggggccttgtgcagaagagggaaggggtacccccccgagcttcagtttcttcatctgcccgatgagcccccatccaatggtacccaggagtggggatgtgctggggctagaggagggaggccccctggaggctggcttggggacccttcaacctggccacctcactcagggtcagaggtcagagcaggcgagccacacaccccgaagtccccccggtcctcggcaggtgctgtccccagcatcactgtctcccctacagatgcccgtgtgtcccctgggcaagagtgaagtgaggcactcatacaggggtgccttgtgagtatggggtcagccgaggatgctgaggggctctcgaggttcagccagagtccctgacgctgggctcgtgctgctctgggggtctgaagggaccctcgctattaccctctgggaggcgcccatccttggtttttttttttttttttgccgagtctcgctctgttgcccaggctggagtgcagtggcaagatctcggctcactgcaacctccacctcctgggttcaagcaattctcccacctcagcctcctgagtagctgggaccacaggcatctgccaccaagcccagctaatttttgtatttttatgagagatggggtttctccatgttggtcaggccggtctcaaactcccaacctcaggtgatttgcctgccttggcctcccaaaatgttgggattacagccgtgagccaccgtgcctggcctagcagggctcttcttatcctgctcaccagagataggaagtcggggggtgacttcaggaaaggcccagagcccgtgatgggcgtggggattggggtgaggacagggctgtcgtgagaacagtggctgcagatgtgagcggctggcaggaagtggccacttgaaccgcagatgcttcctgggctggtcagggaccgggggtgctggctgcagctgggacccccccccctgcatcttgctggcctggcacctgggtccctgggaggcgccacactggatatagccacgtggggcagcccggtctccataacccacactccagtcctcccacgggctggctggcaagcggccctggtgggtctgcgggggcaggggcagccttcctggtttatctctaccggcgcgatctgctcgtccgcctcggctccagaagctggggctcagggtccggcgaggcaggaagcctgaggccacagcccagagcagcctgagtgcagtcatgtgggggcgactgctcctgtggcccctggtgctggggttcagcctgtctggcggcacccagacccccagcgtctacgacgagagcgggagcaccggaggtggtgatggtgagtggtcctggctttggggtgcagagatggggttacatcagagatggagctgggggcccggagctggggagggggaggccgggaagttgcgggcttcagcccagcccactctgtatcccgtctctgaccccatagggctgggctattcccttgagtgtcatgtccagctgtttcccaccagggcagaccccaggctctgagcacctccctccctgctgcttctcgtcacctgccgaggcaggggctgactgaggtcccctctctctcccagacagcacgccctcaatcctgcctgccccccgcggctacccaggccaagtctgtgccaatgacagtgacaccctggagctcccggacagctcacgggcactgcttctgggctgggtgcccaccaggctggtgcccgccctctatgggctggtcctggtggtggggctgccggccaatgggctggcgctgtgggtgctggccacgcaggcacctcggctgccctccaccatgctgctgatgaacctcgcggctgctgacctcctgctggccctggcgctgcccccgcggatcgcctaccacctgcgtggccagcgctggcccttcggggaggccgcctgccgcctggccacggccgcactctatggtcacatgtatggctcagtgctgctgctggccgccgtcagcctggatcgctacctggccctggtgcacccgctgcgggcccgcgccctgcgtggccggcgcctggcccttggactctgcatggctgcttggctcatggcggccgccctggcactgcccctgacactgcagcggcagaccttccggctggcgcgctccgatcgcgtgctctgccatgacgcgctgcccctggacgcacaggcctcccactggcaaccggccttcacctgcctggcgctgttgggctgtttcctgcccctgctggccatgctgctgtgctacggggccaccctgcacacgctggcggccagcggccggcgctacggccacgcgctgaggctgaccgcagtggtgctggcctccgccgtggccttcttcgtgcccagcaacctgctgctgctgctgcattactcggacccgagccccagcgcctggggcaacctctatggtgcctacgtgcccagcctggcgctgagcaccctcaacagctgcgtggatcccttcatctactactacgtgtcggccgagttcagggacaaggtgcgggcagggctcttccaacggtcgccgggggacaccgtggcctccaaggcctctgcggaagggggcagccggggcatgggcacccactcctctttgctccagtgacacaaagtggggaaggctgtactgggtcgaacagggtcccttcccccacttcacgtccttcctgggacctcagaatgtgaccttatttggaaatagggttgttacaactgtcactagcggaggtcactttggagaagggtgggccttacatccagtgtgggtggtgtcctcataagataaggagaggccaggcctggtggctcacgcctgtaatcccagcactttaagaggccaaggcggatggatcacttgagcccaggagttcaacaccagcctgagcaacatggtaaaaccccatctctaccaaaaatacaaaaattagctgggcttggtggctggcgcctgtaatcccagctactcaggagactgaggcagaaggatcgcttgaacctgggaggcagaggttgcagtgagccgagattgcgccactggactccagcctgcgtgacagagagcctgtctctaaattaattaattaattaatttaattcaattttaaaaagacgaaaagtgacggccaggtgcagtggctcacgcctataatctcagcactctgggaggccaagatggaggattgcttgaagccaggagtttgggaccagcctgggcaacatagggggatcccatctctacacacaaaaaaattttttaatgaaccaggcattgtggcatgcgcctatagtcccagccactcaagaggcacaggcgggaggatcacttgagcctgggaggttgtggttgcagtgagctatgattgtaccactgcactccagcctgggcaacagagcaagaccttgtctcaaaaataaacaaactaaaattaaaaaaagaagacgagagatagtgggtgtggtggctcacacctgcaatcccagcactttggaaggccgaggtgggcagatcatctgaggccaggagttcaagaccagcctggctaacatggtgaaatcctatctctaccaaaaatacaaaaattagccaggcgtggtggtgggcacctgtactggggaggtgcccacccagctactggggaggctgagtcaggagaatcgcttgaacctgggaggcggaggttgcggtcagctgagatggtgccactgcactccagcctgggcgaaagagcgactctgtctccaaaaaaaagagaagaggagaggacacagagacacacagagaagaaagccatgtggcggcagaggcagagatgggagtgatgcggacggacacaaactaagggatgccacgatgccaagcacagccaacagccaccagcagccaggagacaggcctgggacgggctctccctcacagcctccagagggaaccagccctgccaccaccttgaccctggacttctggcctgcagaactgtgagacaataaactctcattgttttaagctgcctggcatgtggcactttgtcagggcagcccaggaatctgaaacaggatcaaactctgcttcctgggccctgccagcatctctggctcggctttctgggctggatgcagcccacgacgcactggtgtctgagatggggctggagctggggctggggctgcattccctggagactcactgcaagttcctgcccaggaggctgagggcaccccatcctcagtgcccaatgctgtggccccaccaggcccagagcctggttggccattctcatgcccaccagcttctggctttgggatgtctcttgagcaaccagaatagcacccccaactctgctccccaaaacccatcactagcacggctcagcctcctgctatcccctgactgctggggaccctcgccttccctcctctcacctgcaggctgatccttcttttcactttctgtcaatgtcaccagggataaggtgggacaatggggggtgggggtggacagtgtgtgctggggggttcgggtgctgcagacctggaactcccttctgccaggatgttggcagccggttgtaagccttgcacgggacagaccacaaggggccatgccagtggctgtggaggacacagctggtgtgtggggaaggggagaagcctcagcacctggtgcacaaacacacacacagacacagacacacacacacacagagacaccgctgctcactccagggagtggcacagggcagtttcaaagaccactggggcatgaactatgggggcaaggcagagggttggagggccactgttgggctcctcattgggtctatgtctctgatcagcccaactttgggcagccctgggctgggggtgtcaggtgcccgggacacacacatgcacacacacacacatgcacacacaaagttcatgtgcaccccagaacatgtgagtaagatcagtaacgtgtattcttgtcaatatcctggagtgatcatttaccagagttttctgagatgttaaccacaggcacaagctgggtgtgtgggtatgaatggtccccaggaccaaactgcggtcccacaactgcatgtggttgtaggattatctcaaggtgcaggtgtttgacatccataaaccctcctccccaccactctgaaaggctgggctgtagacgaagacagggctcagaagccctggcctgtgggcccccaccacccggccactatgtctctgaggggccggagtctggccccatctgtggaacgggctggcgctctgggtgctgctttccaggttcccgctgctcacaggaggccgaggcccggctgtgaccctggagatgaggttttatcttacaacatcctctacagcaagtgggcacggggcctcgggctgaggaaggagccacagggcctgtcgcttgtagggtgccaggggtggggaacccaccggccagggcagcctcagaccttgatctcacaggcagcgaggggcctccgtgctggcagagatcagggctgagcggtgttggctgaaataaataccaccccggagaagatgggcaaatgcagacataagcaggtgccaggggtcacaaaggggaatcaaagtctgctggtactggtggcaggcagctggtagggccccccaaggcaggcaggttctgggcctgggggccctgggagtgggctggtcctctgggcacgaggacatcaggaactcacggtgaggaagcaccggggtcacccagccccggcagccggaagctgaaagtgcatttgctgagagccatctgcttccccgcagggccttgtgatgtgagcccgaggtccccggggggcgaaggcagagggtgcgagagctgggacagtcttagggcaatttggggtcctgggtgccccaaagggaggccggggctttgtgtttcagagaaacgcagcctgttccgttttgaagttgcccaccggctggatgttttgctaatttagtccacatcgtgtttgctcagaaagaggcttttggccacacgagtgctttctgggaatgtttcttctcccgggaacagaatgtcaggctgtgggagctgccgtggccccaggaaaatgatgcccagctccaaggctggggggttggggtgcttggagctccagctgtagctaggaaggtgggggatctcccaagggacctccagctgtcccccctgcaccacaccggtgactgctgagcccacacctgggtcccaagagtctcatcctagggacgggcagatctctgtcattctgttccttgggttcatttagaggcaggtgtcacctgggctgaggtctgcccacccaccatacagagtcacaggctgatagggacaggatgcagccagatggtgtcgtcctgctctcagcagggcagccgttaggaagagaagccgctctgactggccaggagaggagaaagattcctatggggccgccaggacttcgggatgggaccccacacccctttcctgaacccaactccacggggctcaggccagctgccacctcctcatttagatggcagaaccccaactggatgggggacacatggcccaggcctggcactgtacaactctgcctcctttccccttccagtggaccacagtgatgggctctgggtgtccatgtgcggtaagaggggagtagcttgtgtcagaccaccaaccaaatcgaaaagctacccatagcacactacccagcaatacaaaagaacaaactccaggccgggcacagtggctcacgcctgtaatcccaaagctttgggagactgagatgggaggatcacttgagcccaggaatttgaggctgcagtgcacaatgatcatgtctatgaacagccatggcactccagcttgggcaacatacagagaccccatctctacaacacacacacacacacacacacacacacacacacacacactagctgggcgtggtggtagtgtgtgcctgtggtcccagctactcaggaggctgaggcaagaggatcacttgagctcaggaggtcaaggctgcagtgagccatgaccacgccactacactccagcctgggcaacacagtgagacctcgtttgaaaaataaaagaataggcctggcatggtggctcatgcctgcaataccagcgctttgggaggccaacgcgggtggatcacctgaggtcaagagttcaagaccagcctggccaacatggtgaaaccccacctctactaaaaatacaaaaaaaattagccgggcatggtggcgggcccctgtaatcccagcttctggggaggctgagacaggagaatcgcttgaacccaggaggcggagattgcagtgagcccagattaaaaaaagaataaactatggatacacgaaacaacacaggtgaatgcaagggaatcatgctccaaagattatccgctctgattccatttacctggcattctcaaaataacaaaattacagacgggtagggggaaaatggcttagtggttgcaggtgttgaggggagagatgaagttatggaagagcagctggaaggatcctgtgcagatgggctgtttgttgactatggttgagattacacaaatctgcccatgaggaaaccgcacactgttaactacaggcaaaacttccctagtccaaaaatcctaaatctgaaatgttccaaaatccaagtctttttgagcagcgacttgacgtgctcaaaggcaatgctcattggggcatttcagatttttagattagggatgctgaaccttagctaactatataatgcaagcattctgaaatgtgaaaaaatctgaaatccgaaacactgctggtccccccagcatttcggataagggatccttgacccgtatgcgcgcgcgcgcgcgcacgcacacacacacacacacacacacacgcgcgcgtgcgcccgcgcacagctgttcgctggtgggtgttgcgtgggccagggtggagggaggatgaatgtcccactttgtccccaggaactctgagcctctgaccctgagtcactcccactgccagtggggggtcggggcggggcggaggagtcggggcaggtcgtcgggggaggttggtaggggagggaggtggggagatattgagcctatgtctcttatctctggggtgggcccagctgttacctgtcctccgcctccccttcaggctcagggtctgagtcctccacctcaaggccggctccattcagcttcacgtcctgctgtaaaggccccggggccacagaagccaggtcatccccgtaggtggaggacgacgaggccggcagccgctgctctggaaggaagggggcctcggtcgggagggcgtggcggggaggggacccaagggccgaggggaggagatccgtggcccagagcagcagcgatggtgtccccgaggctaggcggggggtagggtcctcaccgagggcgcagcagctgggaggcgcgggctccaggggcgcggcctggcggcaggcggcctcccgcaggcggcaggcgctggcgtagaccaccccgtcggagccgcacaccgggttcccctgggcgccgcagtcgtggtcgcagccgcatcgcgcgatcgccgccccctcctcaggggccacggcagggcccgactcgccggggaaccagcctgggggacgaggcaggctcgacagaccccccaccctgaaccttgcccgcgcccccacagaacctgggggtggggaagatgtccctgggtcccgggcccactaccccctcggtgggtcttggggcgcgacagttaatgggaggtcctgagccctggccttatggaatttcacgcaggtatttgcctaatacttacaaaaacagaaacagacttttaaaaagcggttgtaggagagaaaggagacagggcgtcctgtctgggccgccctgcaacaacagccccgtcccctgccgcgcctcctccgcactgaccacacccaccccaaccccacccccaccgcactgaccgctcctatcctcaaccccgccccctccgcggtgaccacacctaccctcaaccccgccccctccgtcctgaccactcttaaccccgccccctccgcactgaccacacccaccacaaatcccgcccctcagcgctgaccgcacccaccctcgaccccgccccccgcactgaccacacccaccgcaacctcatcccctcagcactaaccacatccactctcaaccccgtccccttcgcactgaccacacccaccccgttcggccccgccccccgcactgaacacacccgccctcaaccccgcaccctccgcactcacctccccctcgccgctcgaccccgccctcaccacactgaccaccctcaacccattgcgcccagtccccaccacagtgaccacaccctcactggctcggccctgcccccagtatactgaccattccccagccacttcccttccgcacttaccactcccccagccacgcccctccccgctgaccgctcctccagccccgcctcccccgtacaggcagagcgcccgcccacctctatgctgcgttctcctgactttacgttggcccctcctctgccaagcccccaggggagccctccctggcgtccgagggtgggagtcggggtgtggcaggccgcggtggggggcggcagtggctccgcgcactcacccgggccccgggcaggggcgcgctccacttcgttgcacgcgggtccggcgcacagttcccgggcgagtgggctgtgggtgctgacgttgtagaagcgagtggcctcgaaggctacgggacgagggtggcgggtgaccaagtgcaggcgcgacgggtcagggaccgggccgggccgggggtgcgggcgcgcgggcctaccgggttcgtagtagtcgtacacggagactggcagcgccgacgtcctgcccaccacgcactcccggagagcacggaaccgcacgcacgtcaggcaccggctggggatctgtggggcagcggcgggcgcaggctcgacccgggccaggaggcccggggcgctgagctcaggcccagaactggctgatttcagggatacccaggacgcgtgaaacacagaagaaacgtgatcccattttctttttttcttttacttttctttttttttttttttcctgagacagagtctcgcgctgttgcccaggctggagtgcagtggcgtgatctcggctcactgcaagctcggcctcctgggttcaaatgattctcctgcctcagcctcccaagtagctgggataacaggcgcccaccaccgcaccctgctaattttttgtatttttgatcaagacggagtttcaccatgttggccaggctggtctccaactcctgccctcaagtgatccgcctcggtcccattttttattctttgggtccttccatcccactgggaaaacgtctcaggtggcctctgaaacaccactcctttttgtgtgtgtgcacgcatggctgagcatgtgtgggtgggagtcagcacattcacgatactgtgcaatcatcacctctgtctagttacagaacggtttctttctcccccaaagaaaccccatcgccatcagcactcactccccactcccccagcccctggcaaccacaaatctttccaactctacggatttgcctgttctgggcatttcatgtcaatggaatcatgtactctgtggccttttgtgtctggcttctttcactcagcatcatgtttctgaggttcatccatgctgtagcatggatcaatgcttcgctccttcctacagatggataatatccactgcggcccctccctgctttttctaccaactgccatcagccgagggcacagagctgtcagcatggccaactctgcctggaatttattctcccagtgtcttatttttttttgtttttttttagacaaggtcttgcaggtcttgctctgtcacccaagctggagtgcagtggcacaatctcaggtcaccacaacctccgcctcccaggttcaaacgactctcctgcctcagcctcccaaatagctgggattacagtagcgtgccatcacacctggctaatttttgtgttttttgtagagacagggttctgtcatgttggccaggctggtcttgaactcctgatctcaggtgatccacctgcctcagtctcccaaagtgatgggattgcaggcgtaagccaaagggcctgggcacttttttatattttttgtaaagatggggtctcgccatgttgcccaggctggtctcgaacccctgagctcaagtgatcctcccacctcggcttcccaaagtgctgggattacaggcatgagccaccatgcccggccccagtgtcttttttatggtacaagatacttgcagggagccacaccaggcagtgaccggtgcaccctcaccaacatgcacaccagggaagcctcctccaccaaccccggctggtggtacctcatcaaagtagaagagcactcggcgtccagccacttcatacctcttcatccccatgtgcttgtcaaggagcagctgcagaggaagccagaagtcagggtcctcagactctctacttgcttcctctcccatcccctgggggcagtggtcagtgggatgcttggacttgcccacaagttaccatgggctggggtctgggtgctggtcagtgctccccaggccctgccagcctctcagcacccaggagaggacgctcaaggatggctatccccgctgggagcacctgcctcgcctccctatacactccctcaacccagccccaagcccaggtcaggcttctccgtggccaaagaggtgcccggctgagccctgccgcctgctggtgtctcagctgcactgttcaagttcccctcccagcctgggatttttttttttttttcagtttttgatttaaaaaaatccacacccactccaaggcctctgaattgaccacatcctcatcccctggtgctccgtgcagcctccttggaggggaggtgacaataggcccagctttcctgttccaccctccccacactgcagacctcctttggtccctgaaaccctcgcttcttggtcctctttctcccccagccagagccgggcagcaatccccacccccatgtccctcttccttcctgtacaaaatggggacatggcactggtctgtcttagggttgtgagggtgacagctggtctcggcagaatgtggattgagaataccccatggctccccacccagggccaaagcacatggaactttgctgaagttctaggtggcatttataatagtgtgacagtgggcccggtgctgtggctcacatctgtaatcccagcactttggaaggctgaggtgggctgatcacccgaggtcaggagtttgagaccagcctgaccaacatggagaaactccatctctactcaatacaaaaaaattagctgggcgtggtggtgcatgcctgtaatcccagctacttaggagactgaggcaggagaattgcttgaaccggggaggtggaggttgcagtgagctgagattgtgccattgcacagcctgggcaacaagagcaaaactccatctcaaataataataataataataatagtgacagtggccgcatgggagatccacctgttggagcagcccccacctcaccccatctactcctcagtagacagatgggccatttttgcccagaaaggggaggaaaaaaggggctgggcatagtggctcatgtctgtaaccccagcactttgtgaggctgaggcgggaggattgcttgagcccaggagtttgagaccagcctgggcaacatggcgaaaccctgtctctgccacaaatacaaaaattagcagggcatggtagtgcatgcttgtagtcccagctactcgggaggctgaggtgggaggattacttgagcctggaagttcaaggctccactgggaatttgagccaagatcagatcattacactgtagcctgggcaacagagcaagactatgtcaaaaaaaagaaagagaaacagggtaaaaggggagggggaggggaagggggagggggagagggagagggaagaaaagaatacccatagcattttacaaaggtctggactgccagccagcctgaccctgggtgcctaagccctacctattgttcagagatccctgcccaccgctgctcaccggcgctgcctcacctgctccaggctctcgatgtctgcccggaagcctgacagcaggggcacctccaggacagccatattggaagaccctgcatgcagccaccttccaacaacaggggagagagagaggccctagagctcaagcccagaggtggaattcaaggtcccctctccccctggagcccacacagctgatgtcccaggaagcctgccctggggcctggccggcaggccaacagcacacacatccttggctcggtcaactcagtcaacctattttacagcagggacactgagaccagagggaaagggccttgccaagggctctaggcctgaccaggtctcttgactaagcattgtgttctgtcctggacttcactctgtgtccccagcctgggaagcagctggcgaccccactctggacatggttgcacagagcagccacagctcaggtgcttcaacactgccaccctgcaggagactctgggaaatcaaccccctagctccggcctcagtttctccttctgtaacatggtggggcggggagggaggtaactgggcactctctggagcctgcaatatgccaggcgcttcctatagggcgttggggacaaggaagaggaagccaacattcagagtggagcttgcagctgcggggagtgcaccaagctggactctgatttccagaactttctgagatggggaacttggacacattcgggctgagagtcaaggtcagggcagccgttaccggggtagcggctctgatgggctgcgagtgtcatggcaaccactcacccaccaatcgtcgccatggtgacaagcatccatcaccatggcaacaaacatcttcttagggtgagggcccgctgcggccgggtcccaggctcactcttggaaaccaaggggtctggtgctggtgttatcgggcagggaccagtgtcccagccacacatcgctgtccccatccagcccacccgccccgaccatactggagtcttctgtgtccatttgcttttctttcattcatttcaaaaactggctgggcgaggtggctcacacctgtaatcccagcactttggggggctgaggcgggcagatcacgaggtcaggagttcgagaccagcctggccaacatggtgaaaccctgtatctactaaaaagacaaaaaagttagttgggcatgatggcgggcacctgtagtcccagctactcgggaggctgagacaggagaaccatttgaacccaggaggcagaggttgcagtgagccgagatcgcaccattgcactccagcctgggcgacagggtgagactctgtctcaaaaaaacaaaacaaaacaaaaaccaccactgagtgcctggagccggaagctcctcctggtcccaggaggccatcctctccgcacattgcaccctcctgggatgcccacgccagcagggcaggtggccttacctggtgcacacctccagcatcaccttgtattcctggtgatgctgatcggccgctgggtcatcatcgtcagctgggggccagtctcctcgggaaccctcagctgcggaggcaggcatggggggcgggcgtccctgggcctcaggctcctggaggcttacgagcagctggaaagctggcttggccaccgggtcaggcacattgtaggtgacatcaatctggggggtgttggaggatggaggcttagggacctgggccctccataacaggtgcagggtaggggaggagaagggcagtggggaggtgggaacagccagaattatgaggacaatgacatccatgacagttttagagactaccgttattcgttttagccttgaaatcactgaagcgggtgtaggtacaatcatcagaccagttttatggatctggggtgcagagctgtgctcagctatgtctgagtctaggggtctccctctcatccacagtgttatctgagctcccattttagagatcagaaaacggaggctagcgagagtcatcgcgggaaacttgccctctgactgccagtcagaacccgtgacatgcacctgccccagcctggtctggggctaaatccaggccacagcagggggaatgacctcgagcccttaggcaaatctgcttgagtcaatgggtcagagatccctggactgagggtcaaatggaccctctcaggtgtgggggtggcacacctgagaggacccatggccacctgccttgggcagtattagaaggctgaaaacctgtcctgcagtctggcatgctgctgagttcagaaccctctgggggtccctggggttccactgtgtgattggagggaatggggcacaggaggacaagcccaagatcacctcgtgctccccaaaacctcacctgcatcaggcagcagccgtcccccttggcactcacaaacagccccgtggggaggctggggatctggagacagaagtcaccgtgaggccctgctgacccctcctccaacaacccccaaaccctcatcccaggaacacgcaccgctgctgtctgcagaaccttctggttggtcctgtgcagctcgaaggtttcctggtagtccaggttggtggaggccagggagacagtgaggttgatgcctccagcataggacaagatggcatattcagccaaggcctgcagagccacgcaggtgtcctggggatggaggaggagacggccatcaaccctgagactgagttggccagtggtcccctgaaccccgtcttggaagcctagcctaaaacaggcaccaacggggctggaatagagactggacccagtgcagacacccatggcactgggggcctcaggacagccaggttggtgtgtccccagaggcagaggctgggctcccatgggggatccaggggcatctgtccctcacccccaacccctgccctctttggggctccataaggtgagaaggggccagactgcctggccacctcagagctcaaaacaaggactgcagggaccccacccacccagccctgagcccctccctctggccctgcccggctcgcctgagtggaggagaagcccccaagtgcatttcgctgctgggacagccacttcaccacaggcagggcggcagccacgtcacccagcagagtgtaggtcagaagggcgtaggctgtcatttccacctcggccgagaccactgcaatggaagaggcccactggggacttttgacacagggacatggacccagtgcatggaggtatggccaaggcaggcacccgggagctggggtggccagtacctgactgagagaccctgtcactgaagctcaagaatgtgcccttgtccacgtcccaggaatttgacaggctccagtgggtgaccccatctgcaaggaaaggagtggtcaagagctataacccacccagtgtgtagcctggcatcccatggagcgcatccaagcatggggtctaaagaaaaggtattgtgggaccccagtgggagaagagtatcaggggaagacagctggaacaggaagggccttggggctccatctcagatctgcaaacctatggcagccccagcccttcctgtgcccctggcagacatcgtgaatcaatggctacccaaccttacccctggcagacatcactaatcaaaggccaccttccccttcctggacacagacatcactagtcaatagcctccctcctgaccaggtactgatccagcccctgatgttcctacttagtgcccaagcagccacactcgacttgcaaaggctcaaagattctggccaggcacagtggctcacgcctgtaatccgagcactttgggaggctgaggtgagtggctcatttgaggtcaggagttcaagaccagcctggccaacatggtgaaatcccatctctactaaaaatacaaaaattagctgtgtgtggtggtgcacacctgtaatcctagctactcaggaggctgaggcaggagaattgcttgaacccagaaggcagaggttgcagtgagccaataccgagccactgcactccacactccagcctgggtgacagagtgagactgtctcaataaataaataaatacataaataaaaataataataataatttaaaaagaatggcaaggcacggtggctcatgcctgtaatcccagcactttgggaggctgaggcaggcggatcacctgaggtcaggagttcgagaccagcctgactaacatggagaaactcatctctactaaaaaatacaaaaaattagctgggcatggtggtgcatgcctgtaatcctggctacttgggaggctgagttaggagatcacgccattgcactccagcctgggcaacaagagcgaaactccgtttcaaaaaaaaaaaaaaaaaaaggaagaaaagaaaaaaaaaaaaaaaaagaaaaaggctccaaggattctgagctcgcatgaggtgtaaagactctcaaatccagagagaaaccagcccaccaccaccacctcccactccatccctggatcctctttaaacttttttctttcggaagcaatgaaaacaattcttcaggtggcatcttaatgcttaagcagagaaacctgtctgagccccagtgcagctgctgggggtaggggtggagtggggaggtctgggtgaagtaggaggagactaagtttgggggcattctgagaaagtcaaagctcagggattggagtcccagtggggtgatgattttgtaggtggggagactgacagctcaaaaaagctttccagggctcactcagcaagtggagggaagggtggaagcgagacccaaccctcccctgtctcccagcacccctgtcctgggatgatttccaggaagcctggccggaggcgggggatgcgttctctgctggggatccctctctgagaactccccttccagaggggttggcatcccagatttcacaggcaaggaaagtgatgcttggggctggtgtgacttggacaagccacttcctcaaataaagtcactagcagatgcgataatgaatgaatactataatcaacaaagcaattgacaagcaaaaggcatctcgtcagtttccctttctccttccttccttcctttcttcctctccctccctccctccctctctctcttctctccctccttccttccttctttccctttctttctttctttctttctttctttctttctttctttctttctttctttctttctttctttctttctttccttccttccttccttccttccttccttcttttctttctctttctttctaatggcattatctcagctcactgcaacctctgcctcctgggttcaagtgattcttgtgcctcagcctcccgagtagctggggttataggcacctgccaccacacccagctaatttttgtatttttaggagagacggggtttcaccatattggcccggctggtctcgaactcctggcctcaagtgatctgcccaaagtgctggaattacaggcgtgagccaccgcgcctggtcgactcatcagttttttgttttgttttgttttgtttttgagacggagtcttgctctgttacccaggctggagtgcaatggcgcgatctctgctcactgcaatctccgcctcccgggttcaagcgattctcctgcctcagcctcctgagtagctgggactacatgactcgtcagttgtgataaatatgttcatgagttgtttaccagactccacagtgggcttcccgacgctgtggcctctggggagggccagggacacctacctcgcatgatggccaggctacggagcttgcgcagtgcctcaggggctgccgggctgcggagcagggtcagcgcgtaggtagtcagggcacagctataagggtccatggccaggggcgcagcagactccaggaagtgcctcgctttgtcagtggagcctctctcctcctgcagggtggggtgggaaggtgaaacctgggaggctgctctgcccccatcccacccacccactggcttctgaggcatccccgaggagagctctgggtgactcctagccccttgctttgcatccttctgtggctctcactgcctgcagacccaattttcaaaccccatctcctttcttttctttcttgccttttttttttttttttttttttggtaataggctgggcgcaatgtaatcccagcactttgggaggccaaggtgggtggatcacctgaggtcaggagtttgagaccaccctggccaacatggtgaaaccccatctctactaaaaatacaaaaattagctgggcatggtggcacatgcctttaatcccagctacttgggaggctgaggtaggagaactgcttgaaccagggagttggaggttgcagtgagccaatatcgcgccactgcactccagcctggcaacagagtgaggctccgtctcaaaaaaaaaaaaaaaaatacagacagcatcttactctgttgcccaggctggagtgcagtggcacgatcatagctcactgaaaccttcacttcctgggcttaagcgatcctcccgccttgacctccccagtaactgggactacaggtgcacaccagcacgcccagctaacattttattttttgtagagatggagtctcactatgttgcccaggctggtcacacattcttgggctcaagcgagcctcccaccttggcttcccaaagagctgggattacaggagtgagccactgcccctggctcccattaccattcttgtaagttggcactcctttttccaaatgaggtctggccaggatgcccaagtgcatggcaaatgagcacagtgatactctaggggaagcaggcagagtcctggccaccctgtcccacccagccccatggccaggtctttgttaagacagctagctaaggccaggtacagtggctcatgcctgtaatcccagcactttgggaggccgaggtgggcagatcacttgaggtcaggagttcaagaccagcctggccaacatggtgaaattccatctctattaaaaatacaaaaattagccaggcgtggtggtgggcgcctataatccaagctattcagaaggctgaggcaggcacaagaatcccttgaacccgagaggcagaggttgcagtgagccgagattgcaccaccgcactccagcctgggcaacagagtgagacctcatcttaaaaaaaaaaaaaataatagaaataaaaagctggctcctaagacctccacagcccaggccctccccagcctccaggcctggtcacctccttagagaagcccaccagccctgctcatgccctccctagaatgtgatctgttggaagacagggaccaagtccagaatctactgatggttttggttcagagaagctgcccaataatattatgtggaagaaatgagtgaccagaagcattaacaaatttagcaatggaaccagagtcttctggtggcccaatagaggtatggagttgagctaactctgctttcggaactgtcctggtcatagaaagaatgtttccaaagctttccatccttagaccaggacaaacgtgggaactgtccctaaggtgtgacattgagatgccctttgggaggcatgtgccagggatgaacccggctgactagccagaccctaggactggccctcacaagtccattgcctgggggtgggggaaggttggacatccccatcccaggggcaggaacagtgacatgggagttaccccaggtcacgcgggccaggacgggtctcaaggacgctgcggagaccacaccaagcagggatggacccagcccggccccagctgtgcagatcctcccgtttacagacaagcggatgcaacggaactccaaggggtcaaggtcatttgctggttgccccccagctcatctgattccagcacaggtgtagcgggttgaacggtggcccaccaaaaagatatattccctgggacctgtaaatgctgacttatttaggaaatgggtctttgcagatgtaattaagagtcttgagatgagatcaccttggattaaggtggcctcaaatccaatgacaaatatctttaaaaaattttttttggctgggcacggtggctcacgcctgtaatcccagcactttgtgaggccgaggcaggtggatcatgagatcaggagatcgagaccatcctggctaacatggtgaaaccccatctctactaaaaatacaaaaaattagctgggcgtggtggcgagcgcctgtagatccagctactcaggaggctgaggtggaagaatggcatgaacctgggaggcggagcttgcaatgagccgagatcgcgccactgtactccagcctgggcaacagagcgagactccatctcaaaaagggaaaacaaacaaacaaacaaacccatctctactaaaaatacaaaaatagccaggcatggtggcccatgcctgtaatcccagctacttgggaggctgaggcaggagaatccttgaacccgggaggcagaggttgcagtgaactgagatcgctccattgcactccagcctaggcaataagagcgaaacttcgtctcaaaaaaaaaaaatttgtattagagacagaggtttcactgttactcagtgttactcaggctggagtgtagtggctattcataggcacaatcccactgctgatcggcacgggagtttttgtttgtttttaaaacaatctcatactgtcacccaggctggagtgcagtggtgcaatcttaactcactgcaacctccaccttccaggttcaagcgattctcctgcctcagcctcccgagtagctgggattacaggcacgtgccatggtgcctggctgatttttgtacttttagtagagataagcttttgccatattggccaggctggtctcggactcctggacccatgtgatccacctgcctcagcctcccaaagtgctgagattataggcatgagccactgtgcttggcgtccaatgacaagaacctttaactttttttttttttgagatggagtttcactcttgttgcccatgctggagtgcaatggcgtgatctcagctcaccgcaatctccgcctcccaggttcaagcgattcttctgcctcagcctcccgagtagctgggattacaggcatgcgccatcacacccagctaatttttgtattttcagtagagacggggattctccatgttggtcaggctggtctcgaactcccaacctcaggtgatctgcccgcctcagcctcccaaagagctgggattacaggcaggagccactgggcccgccttttttttttttttttaaattagtgacaggtctcactatgttgcccaggctggagtgcagtggctattcatacgcacgatctccctactgatcagcacaggagttttgacctgctccatttctgacctgggccagttcatccctctttggacaacttggtcatcctgctctcaagaggtcaccatattgatgctgaacttagtgcagacacttgattggtgcagtgcactacagcccagaactcctgggtcaagcaatcctcctgcctcagcctcccgagtagctgggactacaggaatgccctgctgcacatggcaacaagtgttgtttaagagacgagaaggggagaagacagaggagaaggtcacacgcagacaaaggcaggggctagagtgatgcagccacaagccaaagaatgcctggggtccctggaagctggaggcagcaaagaaagctcttcccttagagcctgcagagggagcaagggcctgccaatgccttgattttgcacttctggtctccaaagcaatgagaatgtatttctgttgttttaagccacccagtttgtggcaatttgttatggcagccacaggaaatgaagacagcaggttttgcctcctttggggaacgatctaagacaggggtccccaacctccgggtcacagactggtaccggttggtggcctgttaggaaggggctgcacagcaggaggtgagtgacaggtgagccagcaaagcttcatctgtatttacagccactccctatcgcttgtattaccacctgagctccacctcccatcggaccatcagcagcattagattctcgtgggagcatgaaccctattgtgaactgtgagcatgtgaggcatttgctggcagactccttttttttttgttctttttttttttttgagacagagtctggcttggttgcccaggctggagtgcagtggcacgagcttggctcactgcaacctctgcctcccaggttcaagcgattctcctgcctcagcctcccaagtagctgggacttcaggcatgcgccaccacacaagctaatttttgtatttttatttttattttattttattttttgagacagagtctggcactcttgcccgggctggagtgcagtggcaccatctcggctcacggcaagctctgcctcccaggttcacgccattctcctgcctcagcctcccgagtagctgggactacaggcgcctgccaccatgcccggctaattttttgtatttttagtagagacggggtttcaccagattagccaggatggtctcgatctcctgaccttgtgatccaccgcctcagcctcccaaagtgctgggattacaggcgtgagccaccacacccagacagtttttgtatttttagtagagacagggtttcatcatgttggccaggctggtctcaaactcctgacttcaagtgatctgcctgccttggcctcccaaagtgctgagattacaggtgtgaaccactgcacccagctggttgcacactccttatgagaatctaaagcctaatgatctgtcactgtctcccatcactcccagaaaggacagtctagttgcaggaaaacaagctcaggctcccactgattctatattatggtgagttgtataattatttcattatatattataatgtaataataatagaaataaagtgcacaataaatgtaatgctcttgaatctcccaaaactaccccctcttccccagtccatggaacaattgtcttccacaaaactggtcccttgtgccaaaaaggttggatactgctgatctaagagaccagaactcagaagaccagggagaaacaactgctgccctgcagggcaggccttcaggttcagaagagaaataggttggaaggctatggagaaggcagaaaaagattcttgggagaagtgaagtgacctcaagggataggaaggaggtagagggcctgttgagtgttcactgaagacataagggagggccaggcatggtggcttatgcctgtaatcccagtactttgggaggccaaggcaggaggatcacctgaggtcaggagtttgagaccagcctggccaacatggtggaacctggtctctactaaaaatacgaaaattagccggatgcagtggcacatgcctgtagtcccagctactcgggagtctgaagctgccatgccatggatcccaccctgcaaggggactcacagccctcaccccaagccaaagagaatcacttgaacccaggaggcggaggttgcagtgagctgaaaaaaaaaagtctcacctcaagatatgtgtcataaaagtgtacatatcttgttgtccatagtgatatggacaatgagaagattggaaagcttccagaggagagaacaaacgagatacaaaggatagtactcagaatgacatccgacttctcagtggaacacaggaaactagaagatgatagaacatcatcaattattctacaggaaaacaatttccaacctggaattctatacccagcccagctatcatacagggccagaataagaatatttgcagacatgcaacgtctcaaaaaatgtgcctcccaaaaccctttctcagtaaaggagggtagcaattgtgcagcatcctgggtgctgtccattccaactcgagtgggggccaagggctctggcagggaagtttccagaaaaatgcatttgggaggtgacatatttgaccacttccatgggagatgtggaggaggacttctgaggtatgagggggtgtcatggaatacgtgtgatcttcctcagaatccatatgttgaagctctaactcctaatatgatggtattaggagttggggacctttgagagataattaggtttagactgaggtcacgaggatggggcctccaaaataataggattagtgtccttatatgaagaggaagagcactagagctctctctccacatgcacacactagggaaacgccatgtgaacatacagtgagaaggtggcagtcaacaaatcaggaagagagccctcaccaagaaccaaatctgcctgtgccttggtcttggacttcccatcctctagaactgtgcaaaataaatgcctattgttgaagccacttactccatggtattttgtttctgcagcccaagctaagacagggcattaggaattcagcataagaatttggtcaggggagaaccaattcagcccataacacaaggcaaggggccctctggacattgtgcatggtgggggcggtcttaggtcacagcaaactgtagacccactagttgtctggattgtgagaccaagaatcctgagaagtgcccaaactcataatttatcatgagagattgtagaattgatgtaggtattagggagggcagattcttctcacccagggctgagatccatcgtggaagccttctctgcagagactgtgccatcccccaccccaggaaagcctcatagaagagactatggccctcaagtctcttgggccatctaagccccatccagtaccaactgtctctgaatatcctaacccctttccctgcaaaaacatgcatgagcccaacattttgtagggttccctgaagccaacccttgggtcactggccaggaacctgaactagcctgaaatgattctctgaaggaggtctaggggctgtggacagtcatgggaggctctgtactcagggcacctccccagcccccaacatgtgcccaatttccccctagtagcatgggaatctctctctcctctgctcagattacaagaaactggatgtaatgtgaccattgttgatgaaaagcatgaaaaagcctcgataatgagcagaaggagggcagggaggaagaaatcacccctggcataaaggagggaaccttccatttgctcctccagtgcccagccccgagtctccccaaaccccttctgtactcacctctgaggctgtgcctgtttccaggagagcaaccaccacgtaggctgtcagcgggacagtgccgtggatcccaccctgcaaggggactcacaggcctcaccctaagccaaaggagacagtccacttccccccacttcccccaggcagctccagggagtaggaacaggcaggtcagggctggggctctgggaggaggtgaggggcccgggaaggaggctcaaggggccactcacctggatgtccttgttcaggaccctgcccacggccaggaaggagccatcggcctgctgctgctggatgatccagctcttggcggcagccagctcccgggggtccacgaagataaagctgcgagcctgtgcgaaggacttcaggacaaaggctgtgagcctgaaagaggacagggtgtcagctgaggggttgcagaatggtcagcccccacatgctggctgagggattgcagcaagctcctggcaccacccccggcctccatttcctcatctataagatgggaggggtcccatctgtccccacagggctgtcagagtggaggagggggcacattgcccagcacccagtggggcttgaagacggagctctctccttcctacctggacctctaccctagtggcattcaggtctgctccttgctcggcactcaaggcccttctgtgagctggtctagccctgcctgtcctgccatgtgaggaagacccttctggttgccgacctcacagccatttcttgcttggtccttgccaaaaggcccctgatctcattcaggggccagcagccatgtgccctggagatctgtgcttctctgtggtcccagccagccagtcatgggcattccagtttctgagcctgggaatggctttggaatgggcatgtgatgcaatgctgggagcagctgcagccattttgccaccatgaggggtgcagccatgtgccaagggagggaatacccagggatggaaggaaaaaaacgagccccagtgcactatggggctgctgaattagccaaccatagcacctccccagccctgcagtgtgagctgatgttcagaattgctctccagcccgttttctgttgttttcagccaaaaacatctctgttatgtggcctgtccctcatccaccccatctcccttgccctgcttttgcaggtgccaccctgagtaagagctggcaaggccagggaatgaatgcatgaacaaatgaaggagagaagcacaggatggaagccaggaggccatgagggatgaaaaccaaaattgtcaggagaggaaacttcgcaaattcaggatcaatgaataagctgtcttcaaaatcaagtggctctaggctctttatatgaaccacaaaaatgggatgcattagcctgcccgcctgcccgcctgcctgccttccttccttccttccttccctccctccctcttcctttcttctttctctcttttctttctttttctttctttctttctctttctctctctccttcctttttctctctctcttttctttcctacttttctttcttgattttctttcttctctctctctccctccctcccttcctctctctctctctcttgctttcttgcttttcaagacagggtcttgctctgtcacccaggctggagtgcagtggtgcagtcctaactcactgtagcctacaactcccagctcaagcgattctcccacttcagcctcccaagtagctgggactacagggacgtgccacgacatccagcgaatttttaaattctttatagagatgaggtcttactatgttgcccaggcaggtctcgaactcctgggctccagtgatcctcccacaatggcctcccaaagtggtgggattataggcataagccaccatgctcactgcagcctctgcctctcagggtcaagcaattctcgtgcctcagcctcctgagtagctgggattacagcctcccgagtagctgggattgccaccatgcccagctaatatttttgtatttttagtagagacggggtttcaccatgctggccagactgatctcaaactcctgacctcaagtgatcctcccaccttggcttcccaaagtgctgggattcaggagttcaagaccagcctgactgacatggcgaaaccccatctccactaaaaataaaaaaaaattagccaggcgtggtggcgggcacctgtaatcccagctactcgggaggctgaggcaagagaattgcttgacctcaggaggcggaggttgcagtgacctgagatcgcaccactgcactctagcctgggtgtcaaaatgagaccctgtctcagacaaaaaagaataaataaataaatagataaaataaaataaaatatacccaaagctcatccaggccgttctccctctcaggtacctcaaatgcatcctcttctttctattcccatgttccctggattagccaggagaccccatggctcccaggctcatccccaccccattaccagctatgcacactgcaaccagggggaaactccatgcattttgggcacggcagggaaaggaggcaaggacagaaccaagccagctgtgtgctgggaattgtggaattcccatggtctagcatactgtgctctctactttcccactgtaaaacgcaaacaggataaatgttatcaagtgataaaaagaaatgagctctcagccggattcagtggcccatacttgtaatcctaacaccttgggaggctgaggcaggaggatcagttgaggccaggagtttgaaaccagcctgggcaacatagtgagaccctgttattcataaacaaacacacaaataaataaaaaatgagtgtgtgagtgaactctaatgtagattatgaaccttagttcataacgttttgatgccggtccatcaattgtaacaaatacagcacactaatacaagatgcctatcacatgggaagctgtgtatgggggtgtagaggtgtatgggaactctgttctatttactcaatttttctggaaacctagaactcttctaaaaagtaagatctatggccgggcgaggtggctcatgccagcagtgtttgggaggcagaggtggaggatcggctgaggccaggagcttgagaccagcctgggcaacacagcaacacctggtctctactgaaattcaaaaaaattagctgggcatggtagtgcatgcctgtggtcccagctgcttgcggggctgaggcggaaaaattgcttgagcccagaaaatcaaggctgctgtgagccctgattgtgccaccgcactctagcctgggaaacagagcgagatcttgtctcaaaaaaaattagttaaaataaataataaaaagtaaagtctaatgactatctgttatctgaaatgcttggaaccagaagtgtttcagattttgaatttggattttggaatatttgcatttacgggaatctcttggtatctgtaggggactggttccaggacccccaaggataccgaaatccactgatgctcaagtccccgatatacgagtgtgtagtagttgcatataaccgacacatatcctcccgtgaactttattttttatttttatttttgagacacagtctcaccctgttgcccaggctggagtgcagtggcacaatctcggctcactgcaatctctgcctccaggttcaagcaattctcctgcctcagcctcccgagtagctgggactacagacgcccaccaccatgcccagctaattttagtattttgagtagagacggggtttcgccatgttggccaggctggtctcgaactcctgacctcaggtgatccgcctaccttggcctcccaaagtgctgggattccaagcgtgagccacagcgcccggcccctcctgtgtactttaaagcatgtcttgattacttagaacacctaatacaatgcccacatgtcacttcatttgcatgaattcaatattgtactcagcatgcagcaaattcaacttttcgtttttggaactttgtggaatttttaaaactttttttttttttttttttttaagagatggagttttgctctgtcacccaggctggagtgcagtggcacaatcatagctcactgcagccttgaacttctgggctcaagggatcctcccacctcagcctccccagtagttgggactaaggcatgtaccaccacgcccagcttatttttaacatttttgccgagatgaggtcttgccatgtttctcaggctggtctccgactcctggcctcaaacaatcttcccgattcagcttccccaaagtgcagggatgacaggcacgtgccatcacacccagacttttttttttttttttttttctgaatagtttcgatctgtagttgattgaatcctgtggaactcacagatacggagggctacctgtatacttgggcatcccaaatgcaaaaaatctgaaatgctccaatgaacatttcccttgagcatgaggttggcactaaaagcatcttggagcccaggcacggtggctcacacctgtaatctcagcactttgggaggctgaggtgggcagatcacctgaggtcaggaattcgagaccagcctgggcaacatggtgaaatcctgtctctattaaaaatacaaaaattagccaggcatggtggcaggtgcctatagtcccagctactcaggaggctgaggcaggagaattgcttgaacccaggaggtggaggttgcagtgagccgagattataccactgaactccagcttgggtgatagggtgagaccccatctcaaaaaaagaaaaaaaaaaaggaatagaatagaatgaggcagaagtaacagcctgacttgtaagaccaagtaacaaaaggcgctatggcatccttcccgctttctctcttgaattgctcactgtgagaggaagccagccgccatgttgtaagaacactcaagtagtccctatggagaagtccatgtggtgagcaactgaggcctcctgccaacagccatgtgagggagccaatttggaaacaaatcttccagccccagtagagccttcagatgaagacagcaacagccaacaccttgactgcaacctcagcaaagatccccaggcagaaacacccagctaagctgctcctgaattcctgatccataagaattaatacataataaatagagataatacgtttgttgttttaaatggctacatttggggtcacttgttacacagcagtggataactattgcatctctcacagggtctttctcctgcactgggcagcgaggacctggaggtaggaaccatgtgttcctttttcccccaggatgaagaccagagcctagctcactcaatgaataaatgaatgaatgtgcgttgagtataagggaacccatctagaacagatcccaagttttcaggctccctggcaggatcttggagccttatggtaagtagttaggggaggtgctaacaggacggcactgcactgagtgtaccacatgcttatcccatggatccaggttcttagagggatgtgtggtaaggaaacaggctcagagaggttgatcatcgggtctaaggccacacagctcacatgagacagagctgaggtttgtccagcttcggggtgggtgctgctgccactgccctgcgctcactgcctccttgtcctacagggtccccaggaagacgtccatgtttggagaccaacaggaatgtttcaggaggtgagaggggacctggaagctgctgacttccatgcacacagtgaaatttgatttttcagccatgcgcggtggctcacgcctgtaatcccagcactttgggaggccgaggcgggcggatcacaaggtcagaagatcgagaccatcctggctaacacggtgaaaccccgtctctattaaaaatacaaaaaaagtagccaggcgtggtggcgggcgcctgtattcccagctactcgggaggctgaggcaggagaatggcgtgaacccagggggcggagcttgcagtgtgccgagatggcgccactgcactccagcctgggtgacagagcgagactccgtctcaaaaaaaacaaaaaggaaatttgatttttcttgctcatgctgagagtttaatccccggaagatgctgaggaggtgtgtgcacactgagtgtctaggccgggcacggtggctcacgcctgtaatcccagcactttaggaggccaaggcaggcggatcatctgaggtcaggagtttgagaccagcctggccaacatggtgaaaccccgtccctactaaaaatacaaaaattagctgggcatgatggtgcacacctgtaatcctagctactcaggaggctgaggcaggagaattgcttgaacctaggagatggaggttgcagtgacccaagattgcaccactgcactccagcctggggaacagagttagactctatctcaaaaaaaaaaaaaaaaaaaaaaaaggtccaatgcgtcacaacttgctaatcctggctggtggaggcctcctaggggctgctggggctcagccagcttttggagagtgactcagtggctttagctgtccctggggtgggcggggcctctgcttgctaagacgtgattggggccttgcgttatcagctgtcggcaaggcagggccctgggactagagctgggacagtgtggatgagctcctggggctgggggaggctgggtgagtcgccaaccctgggcccctctggagctaggtaagtgatgctgcccatggcaggaagtactcagccacatgtccccactccctgggatcctggcactgtgactgtgcagtggacactctgttggactaaagacagggcagtttccacgctcacagctgctgtcggcactaccagggtggcaatctccgagaaggagtccggcgatgggtacaggagttggaaagtgactcacagtctcaggtgaaccccatgatgatgccaagaactgcaatagcctgaggatatcaggaaaacaagacccaggtgtgcccggcctcccaggggccctccctgccctggtctcctccctgcagttaccacagaaacaagatcccaggctgctcctgcacacagcacaccccagcctcaaggtgctggtctggcctctgacccctctgccctgccatctcctcctgctccagtcaccgctattcctgagtcctgggagcttgaggaagcccagggcatccagggctcactcccaaggggccagagagcagggcatggagtcttgctcactgtggtaacagcagcagaaacaggaatggttacgatcaccagctctgcactggccccaagccccaacctccatctctggagctgggaccaccacagtctttacttcccagctgtgttccctgtcatccggggatcaggcgccaagtgatctggtcacactgcattggatgtgaggccatggcgtcgggcggggagcctcagaggcaatgcccagggcggtggggactcaccacatgctccccgatgcgtcccgctccccaaacgcgctgtaggagccatcctggcgcttgtaggtcagctggcgctggtagcctgtggggcaagcagagaggaccctgtcctgttgagtggcctggcccaggcccgcccccagggacctacaccactctgccgtcccctaccccggatctccgaagccacaccacatgtggggtccctggaattgcctcgaatcacatctggagtccttgaaactgccatacactcacatctggggtccctgaaactgccccataccacatgtggggttcttgaaactgctttataccacatttggagtccctaaaactgctccacaccacatctgggctcactgaaactgccctgtgtcacatctggggtccctgaaactgccccacaccacatctggggttcttgaaactgcctcatactacatctggagtccctggaaccgcagcgcaccacatctggggtccctgaaactgccccacatcacatctagggttcttgaaactgtctcattccacatctggagtccctggaactgctccacaccacacctggggtccctgaaactgccccacactacatctggggtccctgaaactgctccacaccacatctggggttcttgaaactgccccatacccacagcacatctggggtccccgaaactgctccacatcacatctagagttcttgaaactgcctcataccacatgtggagtccctggaactgctccacactacatctgaggtccctggaactgccccacaccacatctggggtctctgaaactgctccacacatctggggttcctgaaactgctccacaccacatctggggtccttgaaactaccctataccacattgggggtccctgaaactgctccacatcacatcggggatccctggaactacctcacaccacatctgaggtccttgaaactgccccacactacatctagggtggctgtaacctccaactcattcatcttgtttactgacattgccccttcgtgactactggtcacacactggccttcggtcactcccaggaggtcagcaaaaccaccatcttggggcagcgccctctgtcccccacagccctctgtccccaggcgtgggggctgctccaactgctggggcgagagcttgggaagctcagagaactggtggtgccggggacagggaacggagcagggaacgagggggtgaggtgagaggccggtgggccacagggcctccaaggctgggctgggagtgtggttttcctgcaagggcatagggagccatgggtggcgtgtgagtaggagaagagtgtgaggagacatatagagccagtggaccgtagggtctggacagaaagctggggacggggaaccctcccagtgtgcaatgatgagtttggacccagtggcggcgacagaggtggggagccttcctggggtgaaggcagagctactcagccagacacagcctgtgagggaaagaaggacgaatctgagggcaccactgtgtgtggtctgagcctcaggaaggacagggctgtgtccacagagacaggaccggtgaccaaagaaattctgtactgggtgggtcctcccaaattcacatccacttggaacccaaaaatgggaccttactggaaataaaagatctttacagatgtcattaaggttaggatctccagatgagagcatcttggatttatttaggatgggccctaaatccaatgacaggcatccttgtaagagaaaagagaggccgggcatcgtggcttgcacctggaatcccagcactttgggaggccaaggtgagaggatcacttgaggccgggagttcaagaccagcctggacaacatagcggaaccccatctttacaaagaattggctgggcatggtggtgcacacctgtagtcccagctactcaggaggctgaggtgggaggctcacttgagcccaggagttcaagtctgcagtgagctatgatcgcaccattgcactccggcctgggtgacagagcgagaccctagctcttacaaaaaaaaaaaagaaaagaaagggaattagtcacagaggtgacagccatgtgattgtgaaggcacagagcaggctgatcagtctataagccaaggaactcctggagccagcagacgccaggagagaggcctgggacagtctccctcagagccaccagtaggaaccagctctgcggacacctttatttttgacttttggcctccagaactatgaggagatgacacatttctgtcgttctaagccacccggtttgtggcattttgttgtggcagttttaggaaatgaacacaagtgggtttggggggaagatggcgggggttgatttggggtttgttgagtctgaactgcgagttggctggatgcacacagggtccggctgtcccctggaggtacaggctgttattcacgaggagggctcattcaactctgggtggtgtttaaggacctgagcctggatggatccaccagctggtgtccacccatctcccagaccctcacaagtgctaatctgagcccccaggacctggcctcagtggacttggccttcctagctgtccatgatcagccttcaagatgccagactttcagcctagagcaacccctgactgtttcttcttctttattcttttttattttttacagttggggtctcactctgtcaccctggctggagtgcagtggcacaatcacagttcactgcagcctccaactcctgggcccaagtgatcctcctgcctcagcctcctgagcagctgggactacaggggtgtgccaccatgtctggctaacattttttttattttttgtagagaccggggtcttgctttgttgcccaggcttgtctcaaactcctgggctcaagtaatcctcctgcctcggcctcccaaagtgttgggattacaggcatcagccactgtgcctggccttctcttttattttctaaatgttatttttaataatgctgttatattattattgttgtaaaaaaatccacactttaaaaagatgcttttcctctccctgtatctgaacagcaccatctcatcctaacagccacagacatcaggctcctgctgacagtgacaagatcagggccaccctgaatggcctcttttgcccacttcctcccctttgctgcacctggtgtgtgggccacctccagcgtggtcttctccactgaaggctgaacctgcctcccttgctcccacctcaacccaggcacttcttccccaataccttgtactaggtagtcggtggtctctctctccacctcagggctgagctgctgggttttctgaagatacttcaagacaaagacgttgggtgcaaagtggatcatgttctgctctccacagccaaacggcagccgcaggaggttgttgaggtggttcagggttggccccatgacgtcccctggtgggaaggagaagagagttgagttgggggctgtcccagttcagtagagaacagggacagctttacccagggatgggagacagtgagtgtcatgcagtcagccacccaactgccctttgggactggcaccctctgcctgctcagaccagctggtgtcctggctttggtgacagttttacacacctccttctgtgttctttagttttaactcaggctttctttctctagcttttcattctgttcaatgctttttccctccctggcttttaaaataggtgcattgaaagctatacattggcctctaagtacaactttggttgcatcctacaaatattggtatgtctatacaatcattctcattctattctagtctttctaaaatatttttttttttttgagatggagtctcactccatcacccaggctggagtatagtggcacaatctcggttcactgcaacctccgcttcccaggttcaagcaactctcctgcctcagcctcctgagtagctgggactacaggcgtgtgccaccacacccaactaattttttatttttatttttttagtagagacagggtttcatcatgttggccaggctggtcttgaactcctgacctcaggtgatccacctgcctctgcctcccaaagtgccggaattacaggcgtgatccactgcacctggtcctaaaatattctttctaaaatattcagattttctctttaaccaagagcacttcaatttttaaaaaaagtttctatatgtatggagttggaggtgcatttttcagttttctctctttaaaaaaaaattatggttctcccatccccttgacattccgtattcctcttcttggcttccttgtctcaaatatttctgatggacccccctgggacccccaatgtcccctgaacacaccttctttccttctttattttattttattttattttatttatttttagatggaatctcactctgtcaccaggctggactgcagtggcatgatcttggctcactgcaacctctgcctcccaggttcaagtgattctcctgcctcagcctcccaagtagctgggattacaggcttgtgccaccacgcccagctaatttttgtatttttagaagagacgagctttctccatgttggccaggatgatctccatctcttgatctcgttatccacctgcctcggcctcccaaagtgctgggattacaggcgtgagccaccacgcctggccccttctttctttctttagcctctctgcatgtctcactgaggctgccattgcccctacagctcttgttgcacaaatagcctggctactttctaggctctaggctccccagctttttctccatctgctgtgtcactgaaggcactggcacacagatcccagacgtcgcctcctctccattcctgcctctctgcttcttctcctatctcattcagttccatcttagtcactcagccccacatccactctgacttgctctcgtgcctcaggaattgtaaacttgaaattcctctgatctggccacaaccacctacctgcctgagtcccagggcctccaccctctgatgtcagagagagcctcgacaccctcatttgggtctgtccatctccttccggcctctcaccctctcctccctgactcaggcccatcccaaactctcaccacccttctgcccaactcctagccctggatcaatcacagcccctccagcacctgggctactagaggcatcctgatatggattggctgtgtccccaaccaaatcttgtcttgaattgtagctcccataattcccacatgttgtgggaaggactcggtgggagataactgaattatgggggcggcttccccatactgttctcgcagtagtgaataagtcttacgagatctgatggttttataaggcgaaaacccctttcacttggctctcattctctcattctccctgggaccatgtaagacgtacctgtcgccttccaccatgattgtgaggcctccccagccacgtgaaactgtgagtcaattaaacctctttttctttataaattacccagtcttgggtatgtctttatcagcagcatgaaaacagactaatacacatcccaaccctacagaccccctaaggctgcttccaatgtccctagtcagagcctctcacccctactcagcaactgctccggacgcctgccccatcaccaagaccccccaggcctccatcctgcaccgcatatctggctgacttattcaggtatttgtgttttcttggatcttgtccttggcccactgccctcacagggttcactgcaggttcttaggggtcaccctaccctgacctctgcataaggtttagacttggggggctctagatctgccatctcacctggactaggagtccctcaagggtggggttgggatcagctcttgggcttcctcaatgcccagcacatggatgggcatagagaaggcactggaagctgcttgtcaggtgagtgggtgtatgggtggacaccccaagacacaggtccccagcaaagcccagcttgagactaagcctggagtctcaacttcggctcttgccccctgacctctccaagccaggctgtgggacagacgcaccgatgatggaggcggtggctcgctcagacccagggatggcgccgtgtgggacccccagggtgaaggcctcgctgtagctctcgtccacctccatcttcctccagattcggaattcacccatggagccccagccggtggaaaagccaatgaactggacctctggtggcctcgggagggtccaggccacaatgacagactcattggatggctctggaccatggccaacctggaaaaagaaaccaaggctgctggacgctggcaggaagcaggcagtaggcactcaggtggcagtgacaccagctttgtggccagggtcagaggcctcagccatgctcacagtgcaaggaagggtcttcggggagtcagaggtgagagaaatcaggttaccccatccattaaacagccaacagaaacataaggcatggcatctacaggttccaaagtcattgggctccttggaacctctggacctttgcacatgctattgctctgcctagagaacctactctgcttccattttgcctagcgaactcctattcatacttcaaaacctactttggttatgttcttcctctaggaagcagtattagcttcctgtgttgggaagctgtgttagcttctatatcttctttttccttggcccagaaaacaccccccaacccccatttcacttgctcatgtccattcttcttttctcccctacctcctctctctgctccctgatccttgggtgcttcctctgccacagctcttgctacatgtttttttttttttttcggtaagcgactctagactaagaacaacttgaggtggtgctccatgtttcccttgctcctcctgaccctggatcaaagcctggcaccaaacaggaagcagctagtattggaggaacatgaggcttctgcacaagccccaggcagttctgctgtatacctggataaggccaccacgccagctgatccagaatgttctgaattcatcccaggagaggatcttggccgtgtgtgcactggccacgggctctcccatcttgctggtggagatccatgacctggtgttctgatgcccccccaggacgatctcgatcatgcctgctgtgtcctggggcccagaagacaaggccacacgggcatcattgtgagctcgcacagccacatcaaagcgggtgaggcgcagtggccgctgcacatactggaactcatacttgttgggggtggagatgtggactctctctggatggaggaaaggagatggggagttgagagggcacctggaggcatcccactttccctgatggtacctggaggtgagcaccaggaccacaaggagtgggtctcactgtgactcggcacacatggtggaatggtgttggcctaacaatggcattggcaatggcacacaaaagataaaatgggactgggcagagtagctgacacctgtaatcccagcactttaggaggctgaggcaggaagactacttgaggccaggagttcaagaccagcctgggcaacatagcaagactcttatctctacaaaaatgtttttaagttaacagtggcatgcatctgttgccccagctacttgggaggccaaggcaggaggatcgcttgagcccaggagttcaaggctgcagtgagccatgattgcaccattgcattccagcctgggtgactctctctctaaaaaacaagcaagattctctctctaaaaacaaaaagataagatgctcagggataaatctgaccaaagatgagcaaggtgttgaaaattgcaaaaggctgaagagagaaacaaaagaaaacccaaatcaacaaaagctagaccatgttcatggactatcatgaacattagagttcttccccagatggttctacagattcaaagcaatcccagtcaaaatcccaggaggctcttttggagaaattgctaactggattccaaaatttatacagacacgcaaaggacctaggagagctcaactttggtaaagaacccagcactctgggaggctgaggcaggtggaccacctgagatcaggagtttgagaccaacctgacccacatggtgaaactccgtctctactaaaaagacaaaaattagtcgggcgtgggggtaggtgcctgtaatcccggctactcaggaggctgaggtgggagaatcacttgaacccaggaggtggaggtttcagtgagctgagatcgtgccactgcactccagcatcggcgacaagagtgaaactccatctcaaaaaaaaaagaaaaaaaaaagaacacaactggaaaactcacactctctgacactgagacttaccataaagtgacaggaatcaccacaatgtgatatgagtatcaggaaacataaatgcaccaattattatgtggggagaggggctacttagaggcatctggtacttgcctccttgacgaacaaaaataacaagtagatcatcacactttgactagttcatctaagaacactggaattcaacagagaagtgacaagaaacacctaaagcgaagaaggaaatggaaataatacatggtgcttggcgggaatcagctgggggccgggagtagctccccagtgtgaggaaagggtgagtgaacccccgtggtccccattcccaccgtggactctagcagctctagccatgggagagcccctagatcctcgtgggccacagactagcctagggagatacccagagattgtgcaaagatactgttccagagagggggctaaggctgggtctcacacacccttgagccctaagcagctacagcagggcaccgtatcgagatcctagccactgccaggctgcattctgcctgggggccaaacagctcctgcatcttcacatctctggagccccacttacattccctgctcacagccaccaccaaggctggctgctgccaccaggaatgaagcccaagccattggcaatgacctcactgcccccagcagtgaagctgctgcacactttcacgtgccccgagggctaactccccaacctgcagcaactgccgctatgggatgctgcagccaggggccaaagcatgagcaaagctcatgctccccagccactgcatatggctgctgtcactggaagcaactgcaccctccccagtagcaaggctgaacccgagcattccaccagagacctaagaatcaccccacccctgcctaccatagccagcaactgcacacaccaccagggagcctgagataggtcggcccagcccagctctgtccccgcaagtgcctgagggtgccatccaagggccttgagactcccagcctagttcaccacagccggcacctgagcgctcctcctaggcatctgaggtcaggctcacccaacctaatgtgtgccactaacaccacagctggcacacacctgcctatgccacctgtgggcaaggaggttggcctacccagcctgtcacagccaccaccaacaccagagcagattgcttgggagccggagggtcatctcaccactgctactgccagtgcccatgccaagcccactgcccaggggctcaagaacctatccatgttcctggtccaccgctgccactactggcattcaagctagcttcctggaagtccaagagttggcccacctggacccactaacactggtaccagtgtagaatgccctggtgctcaaggaagtcatgctttgcccactgctgccaacactgggacctgaggacaggtccatctggcttccccatccccagcaaaacttcatcacagcctccactaataactgcaccctaagccactcaggaaatcacagacaccactgatgctgtttatagctaaagaaatcatatggagactacactactatacacattcagaatcaatctaaatgctgtacccaaccaacaccacagatagatcttcaggaaaaagtcttcctctatgaaagcaaattcaaaagattggaagaagcgactgttacaccaaacaccaaacgtatagacatcactgtaagaacacaagaaacgtgaaaaagcaaggaaacgtgacatcaccaaagaaacacaataattcttgagcaacagattccagtaaaaaaaaaaatgtatgtaattttggaaaaataattcaaaataatgacattagctgagtgtggtggctcacacctctaattccaatactttgagggtcaaggcaggtgaggccaggcattcaagaccagcctgggcaacatggcgaaaccccatctctaacaaaaatgcaaaaaattagccaggcgtggtggcatgtgcttgtagtcctagcttcttgggggtctgaggtgggaggatcacctgggcccaagaggtcaaggctgcagtgagccatgattgtgccactgcactccagcctgggcaacagagtgagatcctgtctcaagaaatagtaatggtaatgatataaaagaagctcagtgagacaaaagagaacacgtaagaaccatacaaagaagtcagaaaaacaattcaaaaaggaaccaaacaaattctgaaactgaagaattcattaaatgaaatacaaaataggaagcttcaataataaactagatgaagtagaagaaagaatttcagaacttgaagacagatcttttaaaataacccaatcagacaaaaataaagataaaagaaagaacaaagccaacatgacaaatgggacactataaagtaaccaaatactcaaaattttggtgtcccagaaagtgaagaaaaaacaaaaggggtagaaaacctatttaacaaaataatagctgaaaacttcccaagtctaataagagatttaggcatccagatacaggaagctcagacacctccaaatgggtataattcaaaaaggtcttctccacagcacattatggtcaaactgtcaaaagacaaaaatatcatttttttcttttactttttcttttcccttttttccagtgtggttggacaaaaagatagttctaaagacagcaagagagggcttggcacagtggctcacacctgtaatcccagcattttgggaggctgaggcaggaagatcacttgaggccaggagttcaagaccagcctgggcaacataatcttttcaataaatggtgctggcacagttggctatccaaatgcagaaacataaactttgatgcatatcttgcatggtaatccaaaattaactcaaaatgaatcatggccactttgtagtgtaaaacttaaaactacaaaattttgagaaaaaaaaaacagggtttagcaaagatttcttaaatatagcaaatgcattaatgaataaaaagaaaaaataataaattgcacttaattaatataaaaaaacttctgcttctcaaaagatataattaagagaatgaatgaaaaggtaagccacggtctgggagaaatatttttgcaaagcatttatctgataaagaacttgtatccagaatatattttcaaatctcaaaatgcaataaaaaaagtacaactcaattttgaacaggttaaaagattggaacagacgtttttccacaaaaaaaaagacatactcatagcaaacaggcaaatgaaaatatgcttaagatcatcagtcatgatggaaatgcaagctgaaaccacagggagatgtcactgggtatctattagaatggctaaaagtaaaaagactaacaatactaaatgttggtgaggatggggaggaaatggaactctcacatactgcaggtgggaatacaaaatggcctgagcactttagaaaacaggttggcagtttcttaaaaagttaaacatacacgaaccatatgattctgttctttcattcctagctattgacccaagagaaaggaaagcatgttacccagaaaagacacaaatgataatagtagctttatttgagatactcccaaactggaaacagcttgaaagttcatcaacagatgaatggatgaatacattgtgatatatccattcaatggaatcctactcagccttaaaatgattgaattattgacacatgcaccatggatgaatctcaaaattattatcctgaaagaaaccagacaaaaagaatacatacgacatgattccatttatataacattctggaaaatacaaactaatctacagagacagaaagcagctcagtggtccctagtgatggagtaaacaggagtgagagattacaaacgggcatgactcttgggaggtgaaggaaatgtttgttatcttagttgtgacaatggtttcacagacgtacatatatgttaaaactcaccaaattgcacatttaaaatgtgtgtaatttattgtatgtcaattatgcctcaataaacatatttaaaatattattgcctttactattcatataaatatgttcataaaagtgttaattacaatattaaaaagtagaagtactataagaaagtccagtaatatgttccaaaatgttccataacatgttctaaaatgctccataatggttaaattatggaacagttattatgaaacattctgaggctgtcttgaaatgctgttcataaagactttatactaaccagaaaaagtgctcagaatgtgttaagtgaaaaatgcagcatatataattacatagtgcgtgaagtaacaactatgttaaaacaaacaataatcaaccctatgaaagcaaatacaacaaaatgtcaaaggaagtcttctttgggtgtgaaccagaggagatgcttttccttctaccttcccaaatttctgcaatacacatgtattgcttttcattttacaatgttttaattgtggtaaaatatatataacataaaatgtaccatcttaaccatttttcagggtagagttcaatggcattaagtacactcaatgttgtgcaaccaccaccaccatcacccatttcaagaactcttttcatcctgtaaaactgtaactctgcacccattattacattaagcactcgctccctattccctcctcccccagcctcttgtaaacaccattctactttctttctctatgattttgactactctaagtgcctcatataagtggaatcatatggtatttgtacatatgtattgcttttaaaaatgtttttaacttaaagttttgctaagataatcacatgcaattgttataaataattcagagagctctctgtacccgtttccccctctccccatggtaacatcttgcaaaatcacaatcaggaatattgacattgataaaatccatcaatcttattcagctttctccaattctatttgtactttttatgtgagtgccatgtaattttatcacatatgtaggtacacgaatccactaccacagtcaaggtactaaacattcccaacaccacagagattctcaccgttgcccatttataaccatatccatcccctacttccttctccctctccctaacccctggcaaccactaatatgacctccatttataaaattttgtcatttcaaaaatataaatggaataattcatgtatcttttgggattttcttcccactcaattcccttcattcaagattcatccaagttgttttatgtatcaatagtttgtcctttttattaatgagtagtattccaaggcttgaatgcacagtttgttaagtcattcacctgctgaaggacatccgggctgtttccagtttggggctactacaaataaagctaatatgaacatctatgtacaagtttttgtgtgaacataagtctttgtttctctgagatcaatactcaggagtacaactactgagtggtggggtagttgcatgctcagttttttaagaaaccaccaaactgtttttaaaaactaccaaaggtggctgtaccattttacatttccaccagcaaagtttgagtggtccactttctccacatctttgccatcatttagtgttcactatttttttttttttttgagatagcaactcactctgtcgcctaggctggagtgtggtggtgccatcacagttcactgccacctcagcctctcagggtcaagcaatcctccctcctcagcctcccaagtagctaggactacaggcacaagccaccatgcccagctaatattttgtatttttgtagagacagggtctcatcatgttggccaggctggtcttgaactcctggactcaagttctccacccaccttggcctctcaaagtgctgggattataggcatgagccactgcgcccagctctatttttaatcttagccattcttataggtggtgtgtaggggtatgtcattatgctgtaatttgcatttccctaatgataaatgatgttgagcatctttttatgtgcaatttgccatctgtatgtctcctctggtgaaatgtctggttatttcttttgcccacttttttgtttgtttgtttgttgttgttgttgagatggagtctcattctgtcacccaggctggagtgcagtggcgcaatcttggctcactgcaacctctgcctcccaggttcaagctattctcatgcctcagcctcctaagtagctgggaccacaggcacctgccaccatgcctggctaatttttttttgtattttttgtagagatggagtttcaccgtgctggtcaggctggtctcgaactcttgacctcaagtgatccacctgcctcggcctcccaaagtgctgggattacaggtgtgagccaccacagtcggccttgcccacttttaattagatggtttgttttattcactactgaattggagacttcattatatattctaaaaaccagtaatttgataaggtttgcaaatgtattttctcccagtctgtagactgtagttcctcccttaacagggtttattgtggagaaaaaaacttttaaagtttgaagaggtttatttattaatgtttccttttatagattgtacttttcaagtctaaaaactatatgcttggctctaggtggcagatctttttttccctcttttctttctccttccttccttccttccttttttccttcctttccttcccttcctctttcctttctcccttccttccttccctcctgccttccttccttccttccttccttcctccttccttcctttcttccttccctccctccatccctccctcccttccttacttcatttttttgagacagggtttctctctgtcaaccaggctggagtgtagtggtacaataaaggctcactacaacctccacctcctgggctcaagcaatcctcccacctccacctcccaagtagctgggactacaggcgtgcaccaccacgtctggctaagtttttgtttgcttgtttgcttgtttgtttaattttttgtagagatgggatttcaccatgttgcccaggctgtcctgtgtttttttctaaaagcactatggttttacgtttaagtccatgatccatttagggttcattctcgtgtaaggtgtgatctttaggtccagcctcatgtgttgttgttgttgttttgagacggagtctcactctgtcacccaggctggagtgctgtgatgcaaacttggctcactgcaacctccacctcttgggttcaagagattctgctgtctcaacctcccaagtagctgggattacaggcacacacaaccacacctggctaacttcatacttttttttttttttttttttgagttggagtctcgctctgtcacccaggctggagtgcaatggcgtgatctcggctcactgcaacctccgcctccccggttcaagtgattctcctgcctcagcctcctgagcagctgggattacaggtgcgtgccaccacgaccagctaattttttgtatttttagtagagatggggtttcaccatgttggtcaggcttggtctcaaactcctaaccttgtgatccacccgcctcggcctcccagagtgctgggattataggcgtgagcctaccgcgcccggccaactttgtacttttagtattgataagtttcaccacgttggccaggctggtctcaaactcctgacttcaaatgatccaccttcctcaggatcccaaagtgctgggattacaggtgtgagccaccgtgcccgggcagcctaaccttcttgcttggtgcctgcagtgcacattcctgtgtattcattccctgcgtattccctgtgtattcattccctgagtattcattccctgtgtattcattcattcatgccccaccctcactggctctgcctgtccccagctgggacatcgttcttcctaaaccacagtgcccccttcccaggggaagggcaggtgctcactttgcagcgggacagcccccacagtgtgggaaagggggaaggccaaagtcctgacccagccaggtggccacaccttagcagaatgggcacgggggactcaccactgggacagaagaatgcgctgtaggtgtacgcccgggggactccttccgcctgaaacaaagaaacaaggagaactgagtgctggggcggtgagggggatggtcagctcagcggagcagctggctctcccacagcaatgacttcaagtccagaccacataattgtgcttccaggttttacgtggtatcagcacggtcacaccaagatcacaggtgcgtggagcaggacagggccacccacttcccaggctccaatggggaaactgaggctgctcccccttgctggccaaaaggaactcaccaactgcttctaaacttgtcatggggcccacatccctaccctaccctcccagccaccctcttcctcccatctccctctgggcagaggacatcatgaggacaaataagccaggttctgaggcctcatttgacatccgtgagcactgtgagaggggctcctgcatctgccaaggacgagtctccgtcccactgtctgtctaccacatctcttgtctcctgtctcttccatctgggttctcatttctgcttcttctatggatgaccccaaataccagaaggcagctgtctcagtctcttaaaaagggatgcccagaatttaaccccctataccttgcggagcttggtctgaccaacacggcccctgtgggggcccttggatcagacctcaaagggttaacatggggcagctgcaaccagaaggcctggcagcccctttccccattaggatggtcaattttatttatttatttatttatttatttatttatttatttatctatctatctatgtatctatctatctatctatggacagagtctcactctgtcgcccaggctggagtgcagtggtgtgagtgatctcagctcattgaaacttctgcctcctgggtttaagcaagtctcatgcctcagcctcccaagtagctgggactacaggcacatgccaccacgccaagctaattttttatatttttagtggagatgggattttgccatgttggccaggctagtctcaagctcctgacctcaagcgatccgcctgcctcggcctccgaaagtgctgggattacaggcatgagacaccgtgcccagcctaggatggtcaattttaggtgtcaactggactgggctccaggatgcccaggtagctggttaaacactctatctgggcgcgtccaggaagtgcttctgcaagagatcagcattggtgttggaggactgagtagggcacacggccctctccaatgtgagtgggcaccatccaagctgttaaacgtctcctgatagaacaagacagaggaagattggttccactctctgcccaactgcttgagctgggacattgatcttctcctgctcctggttcccaggccttcagacctgggctggaatctacaccattggttctccagctctcaggccttccagctacaccactggctttactgggtctttagcttttttgttgttgttgttgttgttttgggttttttttgtttttgtttttgtttttttttagatggagtctcactctgttgcccaggctggagtgcaatggcgcgatctcggttcactacaacctccgcctcctgagttcaaatgatcttcctgcctcagcctcctgagtagcagggattacaggcaccaccaccaggcccagctaatttttgtacttttagtagagacagggtttcactatgttggccaggctagtctcgaactcctgacctcaggtgatctgcctgcctcagcctcccaaagtgctaggattacaggcgtgagccaccacgcccggcctcctgggtctctatcttgcagagggcagcttgtaaacttctcggcttccataagcgcatgagccagtaccttatgataaacctatcctacagatgtatgtgtgggagtgtgtttatataacaaatctcattctatgtatgtagggggtgcggatttctgtttctctggtgaatcctaatacaaccattcctgctgactggcttagggccactcactcaacctctctgggcccccatttcttcatctctaagatgggggttaaagacccccaacttcaccttgtgacggggttatcatgcttcagaaagggtctggagtcttctcagtgctactgacagtcagttcttgttatattttctcatccttacctactttcattacaaagctctccttgaaattgtcatgtgtctatactgatgagtccaggagatgcttgtccccactcacatccacttcctagtaaagttcccagggttggtgctgagaggctgaggacaccatctcaggctacatcgagccgtccacctgccaggatttcatctcacacctgctaggcccgatgtggcacccacgggtcatttgctaagctagggggcaccagggaaggccccagaagcattgcttaggcctcagtaaccccccatctacctgcctggccccttgtcgggaaagggatttggagcaatgggcagggctaggccattgtaacccacggtagttttttgttttttgtttttgagatggaatctcgctctgtcgcccaggctggagtccagtggcgcagtctcagctcactgcaacctctgcctcccaggttcaagcaattctcctgtctcagcctcccaagtagctgggattacaggtgcctgccaccacacctggctaattttttgtatagtttagtagagacggggtttcaccatgttggccaggctggtctcgaactcctggcctcaggtgatccacctgccttggcctcccaaagtgctgggattacaggcatgagccactgtgcctggcctcatggtagctttttaacagctacataatcctaaaaattgtgcataacctaaatgtccaccataggtgaacagataaagaaaatgtggttcatccatccagtggaatatgattgagccatagaagcaagcacgtatctatgctgcaccgtggatgaaccctgaacacattgtgctgagtgagagaagccagactcaaaaggccacatgttgtatgattccattgatacaaaatgtcccgtgggcaaatccatagagacagaaccagatccattctgttggtggtgagtgatatggtttggatttgtgttcccacccaaatctcatgttgaattgtaatcctcaatgttggaagaggggcctggtggaaggtgattggatcatgggggcggatttcccccttgctgttctcgtgataatgggtgagttctcatgagatctggttgtttgaaactgtgaagcggctgggcacggtggctcacgcctgtaatcccagcactttgggaggccgaggtgagtggatcacgaggtcaagagattgagaccagcctggccaacatggtgaaaccctgcctctactaaaaatataaaaattatccgggcatggtggcaggtgcctgcaatcccagctattcgggaggctgaggcaggagactcgcttgaacaaggaggctggaggttgcaatgagctgagatcatgccattgcactccagcgtggcgacagagcgagactccatctcaaaacaacaacaagaacaacaacaacaaaactgtgaagcacctccccttccctcctcctcctgctccagccatgtaagacacgcctgcttctccttcacctcctgccatgattgtaagtttcctgaggcctccccagccatgcttcctgtacagcctacagagctgtgagccaattaaacctcttttctttactaattatccagtcatggtcgggcacagtggctcatgcctgtaatcccagcactttgggagaccgaggcgggcgggtcacctgaggtcaggcgttcaagaccaacctggccaacatggtgaaaccccgtctctactaaaaatacaaaaattagccaggtgtggtggtgcatgcctgtagtccccgctactcaggaggctgagaaagaagaatcactggaacctgggaggtggaggttgcagtgagctgagattgcaccactgcactccagcctgggcgacagagtgagactccatccccaaaactagtaataatataaataaactaataaataaataacccagtctcaggtatttctttatagcaatgtaagaacgaactaatacaacaaggatgcactgtgcctctggctgaccattggctggggccctgggcacaaatccaggggcccctcatggtttctgggtcccaagaaacctctgctgactcagctcacagaggaccccacagctggcttcctcaatgatgcccatctcttccactctgcccctctgccgtggcttgggtttgctccttgagtgttagcccatctcgggctgcacttgtccatcctggttccaacctcctttgtctctgtgctctttctggcttggggccagatctcagaacacggagcctgcatgatgcacgaatagtagctccggctgggcatttctaaagccttgtagtacagatctgtgcttcactcctttcggcctctctggatttgcctgttctgggcatttcatataaattgaatcatacaccatgtggccttttgtgtttgacttttttcttttttcttttttcttttttttttttttgagacagggtctggctctctcacccaggctagagtgcagtgttgcaagagtccctctgttgcttactgtaactctcacctcctggactcaagcaatcctccctcctcagcctcctgaggagctgggactacaggtgtgtgccaccacgcccagctaatttttgtatttttagtagggacagggttttgccatgttgcccaggctggtctcaaactcttgacttcaggtggtctgcccaccttggcctcccaaagtgctgggactataggcgtgagccaccgtgcccggcctgtgtctgtcttctttcactcggtatcacgttttctaggtttatccacgttgtagcatggatcagtgctttatttatttatttatttattcattcattcattcatttagacagggtctggctctgttttccaggctgagtatagtggcataatcatagctcactgcagcctccaacttctggcctcaagccatcctcctgcctcagcctcccaaagcacaaggattacaggtgtgagccaccacacccagcccttcactccatttcacagctgaataatattccattgcattgaggaattgcatttcattgacccacattcatttctctaattcatcagctgatggacatttcctaaaatagaaagtgtatccctgactttggtttgggattccccagttgactgttataaatgcctgtgtgacaacagcacgtgggtctttagtagacaggccagataccatgagaggctttccaccaacactctcatttaaccatccaacgcttccatccgaatctggggctctcactccagagcccactccctggctggccagccctcctatcactccagtgaggcccgaattatttctgcctcctctttgctccttggaatttcactgaagtgaaattcacgtggagatgattgaacactctcagcctcccagcagatatagaggatcttagtccccttgcaggccagcaggggagcaaggcagagcggtgtccgtactccctgcacctgccaagccatccccaccctggtacagtgcccatgatgggccgtgcacagatgatgattccccaccggcccatgcatcgtattcagcttcctgctcctaagtccatctcagctggtggcgcccacagtcctccggtgggaagaggtaggaggagcattttgctgctttatcaagccacacatcctggtgcctcttgtttcataaattgcttttctaattgtagcttcatcttttgcatcaacatttcaagtcttctgatgcctgtatctttccccagagctgcctccaggaagccggacaagtggatactgcaggtgcagagacagttctgcggcatggatgggaggaaaggctccagggaaggagaccctcaagagtccccctgtgtgcattgagaaatcccttctgtaaggggaggaggcaagaacgccaggcctccaggttctgcagctcggaggggctcgctgcctccttcttgggccttaggagggcaggctgtggcccagggaggatgccctggctgggcaaagggtgactgggggtctctgcatttccccatctggaccctcccaccctgctggctcacagagatctcggtccccacctgacagcactcttgtccccaaggaatccatcacatcacatcaacgacactacagcggtgacctgtccactgtcaccgctccggagttctgcccagtgggcacatgactcctggtgctgacagaagccacttgtgttcagggccagcaggatcccagcagggagggagagcagctgtttgcagctgggcctctggggaatgtgagtcccttcgggctgctgttaggggctgttggtgcggcaccaaatggagcctcagtagggctctgatgtgtccaagcagccaagaaaagatgaggcatggtggctgctgcatgctcagccctgagacatctgtgtgtcatctctggcttcccaccccatcttatgaaggtgagcccctcgtcttacagagcggggctggaaagccaggatgcttcccgagatcatgggtaagtggccaatcctggattcatagctgggggtctgcaagatcctggcgcctgcctctgccccctgcagctctgtgtccttcctacacaggccatccaatgacaatgccccaaatgctgagtcatggtccccataaatgcctatgacaagcacgagatgagggacatggtcttcctaaatagttcacccaggggtcagggagcacttgctgcagcccctgaagagtcccaagctgctttaccgaagcccactctgcgctttagggagggaacggactaccatgatcctctaacaaggaagtacccgaaagtccaggcacctgagctctcaagcacaacccgtgaaggctgcccaggccctggctcagcctcagaccacacactccagctgggcccagcttcatggctgaaggaatgaggccctggctaagcaccagagatgaggacacggccttacctcaaccatcacactgcgcctgacgtgatccaccccgatggggaccctcctgtcggcgtgattctcctcagggtgtttgctggacctcccatcccggcagcaatttgtgtctccgtaagcaagggctttggctgcagaaatttgatgtcttggtctcagaacaggtctccacccaagatgggggctgtcccatccctatccttatcccagatgtgtgtgcatgcatgcatgtgtgtgtgtgtgcatgtgtgtgtgtatatgcagatgtgtgcatgcatgcaagtgtgtatgtctgcacatgtatgcatgtgtttgaatgtacaggctcatgtgtgcatatgcatgcacttgtacatgtgtttgtgtgtacgagtttgtgcatatgcacgtgtgtgcatttgtgtgcacgagtttgtgtgtgcatttgtgtgtgtacaaatatgtgtgtgcatatgcatgtgtgtatctgtacgtgtgtttgtgtgtatatgcatgtgtgtgcatttttccatgtttgtgtgtacaagtttgtatgtgtatatgcatgtgtgtatgtgtgtgcatgtgtttgtacaggttcgtgtgtgcaatgcatatctgcacatgtgggcatgtgtgtgtgtatgatttgtgtgtgtgtgtgcatgtctgcatgtgcaggcatgtgtctgtgtgtgtggatttgtgtgtgatgcatgtctacacatgtgggcatgtgtgtgtgtggattcgtgtgtgtgatgcatgtctacacatgcaggcatgtgcgtgtgtggatttgtttgtatatgtatgtatgtctacacgtgggggtgtgtgtgtgtggatttgtgtgtgtgtatatgcatgtctacacatgtgggcatgtgtgtggatttgtgtgtgtgaatgcatgtctacacatgtgggcatgtgtgtggatctgtgtgtatgcatgtctacacatgtgggcatgtgtgtgtggatttgtgtgtgtgtgtgaatgcatgtctacacatgtgggcgtgtgtgtggatttgtgtgtgtgtatatgcacgtctacacgtgggcgtgtgtgtgtggatttgtggtgtgtgtatgcatgtctacacatggggacatgtgtgtggatttgtgtgtgtgtatatgcatgtctacacgtgggtgtgtgtgtggatttgtggtgtgtgtatgcatgtctacacatgtggacgtgtgtgtgtggatttgtgtgtgtgcatgtctacacatgtgggcgtgtgtgtggatttgtgtgtgtatgcatgtctgcatgtgtgtgtgctacactgggttggcaccttaagagcccagctcccccaacaggtgagaccccagggcttgcctccccactcctcctgggcccattccttctgtcctgcttgccccagttgctgtcccattttccttgggacagtcctgaccttacctgctgccccatccacccctcatccccaactcgggtcaatgccaggacacttttgtggcctggagaggggggacaccccaagaactgtggggtcctcacccgtgatgttgttgagtcccaggtcgctgaaggacagaacgacccagatgggctcagcctccccgggggccacacacatcttcttggtcacatggcgtttgccaggatgcccaacaaactggatgcccttgggaaccgagagcttcatgtacacctgcagagggtggcattggctcatggcgcctggaatccagaccccctcccagtgcctggaggcccaacacacatcccaccactcactgcacacaccagacttgtcagcctcccaaagagccatgctccccccgggaaggtcccctttccatttccgatcagaacaaactaccctctgctgtctggtgccccacttggccttctcatgcccatctgtcttgctgtgagacctctcctccccacagccctccgtatcctcacaggtccagatctcccatggactgaagctgccagttccagccagggctgcctctcctgcatgtccatccactccgggactccagatggatgtaacctctcccacagcaggtccacagagtgcctctcctgaccctctttccaaccgtgcagctccatgatgtcagagtacagctctgtgtgtgcacgtgtgtgtttattcatgtgcatgtgtgtgctgtgaatgcatgtgtcccctgggtgcacacttgtgtgcatggatgcaagcacagactgcatacacatgtgcatgcatgcatgtacacacatgtgcatctaccgggtgaaggcatgtggatatgcattcgtgtgtgtgtgtatgggcatgctagtttctgcatgcatgtgtgtgcctatatgggtacagaggtgctatggatgcacccatgggactccatgtgcatgtctgtgcatggatgtgcaagtatggcatgtgtatacatgtatcatgcatgtacatgtgcatatgtataccatgatgacttgtgtgggtgcatcatgtgcatgctcacacatactggtctctgtgtgcatgtgtgtgcattttgcagggtgtgtgcatgtgcattgtgggtgcatatgcaagcacgtttgcaacccctccatctaagaggaaatctttgctccacatccatttgtccaaccagcatatatggagcacctactgggtgccccgctaggaattaaagaaatggctgatcaagacatgagtgattgctgagcctcagaatgttgtcccacccaaggactggcacagaggctgcaggtgtgatgtggagagaagcatgcggggaaaatgtgaagtggcatacatgatagagtcctgaatcctgacaaaggaaaggcccagctagatctgagagccaatggctgctgcagggtgcacatcaggaatccccacatccccctcaaggtagcattttcccaggaagaaagaaagaggctgggtgcggtggctcacacctgtaatcccagcactttgggaggctgaggcaggcagatcacctgaggtcaggagtttgacaccagcttggccaacatgaggaaaccccatctctactaaagaccaggcgtagtgctgggcacctgtaatcccagctactcaggaggctgaggcagaggaatccttgaacctaggaggtggaggttgcagtaagccaagatcacaccactgcactccagcctgggcaacagagcgagactccatcaaaagaagaagaaaaggaaagaaggggtaaggaggagaaaagacgggaaaggaggggaagggaggggaagagaggggaagagaggggaagggaagggaagggaggagaagggaagagaagggaagggagggaaaggaaagggaagggaagggaagggaagggaagggaagggaagggaagggaaaggaaggggagtggaggggagaggagcagaggggggaggggagggggaggggaagggaagggagaaagaaaagaaagaaagagagagaaaagaaaagaaagaaagaaaagaaagaaagaaggaaggaaggacgggagggggggagggagggaggaaggaagggaggaaggaaggagaaagaaagaaactcaacagtgtcaatgagccattttccaggtcctgagtgaaatgaccagcgctccccactggagggtctgaatgggtatgttttctctgtcttggggatggtcatacaagctggggtggtccttaagcacatacactgcccagcaggacttccttcttcctgctggaaaagctagacaccagcatgcgctcagagccaagccggacatctggggattctgctcacaggtttcagagggaaacctccctttaggggccaacctacaggtcagggcatagtctgtgtgtatgctttcttttggaaaccgagatcctattcctcccaaccataatccatataaaaagaacggtaaaggatggattgtaaaggttgggactgaagctaggattctgggcaccactacctggccattctgagtctaacatctcccatttactcctcaccgaagccaccctgtgaccgctgccttggttgcttcctgcctccttgcctcttgcctagacaatggcaggagcctctgacctcctcgtcctcttgctcctcacctgcttttccatcttccctgaccagaccccaaagccaagccaaactatgtctgaggcaggacccaggaaaggtcaagctgcctcctgcttctgttgcttgtacatgctgttccctctttgcgaatgcccttcccgccccgatgcctgactcaaacatcacctgcagactctcaggttcagggggacttccccttttctgggctgtcccggcacccgtagacattgattctaacacacagctccaccactcactccctggaggcccctgaacccatgacaatgcttctttgagcttcctaatggtgaatgattccatcacagacccttcttccttggcccacacaggagcttgataaaatgatgaaggtggccaggcgtggtggctcatgcctgtaatcccagcattttgggaggccacggcaggcagatggcttaaggtcaggagttcgagaccagcctggccaacatagtgaaaccccgtctctactaaaaatacaaaaattagctaggcgtggtggcgggcgcctgtaatcccagctactcaggaggctgaggcaggagaatcgcttgaacccgggaggcggaggttgcagtgagccaagatcacgccactgcactccagcctgggtgacagagcgagatcctatctcaaataaataaataaataaataaataataatgcaggtaaaattgtcagtccagcaccagctgcagaagtacatgccccaccaaaactgagtgagtgggatctaaacacaaaccacttcgctccaaggttgagcttggatctcacatcctgcatgacgggatcttctgatactggcacaagccaccagaagccaagagacagggagagaggggccaaatgcagtggctcatgcctgtaatcccagcactctggcaggccgaagtgggagggtcacttgaggccaggagttcaagaccagcctgagcaacatatggagatgccatctctacgaaaataaaataaaataattagccaggcatggtggtgcacacctgtagtcccatctacttgagaggctgaggaggggggattgcttgagcccaggaggtcaaggctgcagtgagctgtgattgtaccagtgcgctccagcctgggtgatagagtaagaccctgtctcgaaaaaaaaaaaaaaaaaaaaaagagaaagagagagaaagaaaggcatagacagattctccctcagggcctccaaaagggaccagccctgatgacaccttgccttcacacttcttctcgtgaactgtgggacaatacatttctgttgttttaagccacctggtttgggctaccttactagcccaaggagactaggacagcagcctttcctgccgcctccaagagagagctttggccttcactgcacacctctggcagacactggaaccccaataatatcatcgaaaaacagccctgcttaatgttctcagtgtctactgagactaactcatttaaccctttaacgcccagcgaggctccgacacaccaacagattgaataacgtgcccaagatcagcagctctatgagtataaaccgggatcccaagcaccctctctgttcaccaccaggatttcctggtactttgtggggagcctgtgaattaagacccataggccaaaccggatccaccacctgtcttttgggcccacaagctaaagatggttttcatctttttcaaatggttaggaggaaaaaaaattaaaagaagaatgattattttgtgacaggtgaaaattctatggagttcggatttcagtgtctagaaatcaagttttattggaacacagccatatctattcaggtaagagatcatctaggttgcttttatgctataagggctgagttgagtcgctgccacagggattgtgtggctggcaaagacagaaatatttcctatctggccctttacagagaaagctccatgctatcatatatgataccagtccaggcacgcccttgctaggccagggagtcagggacaacagctccacttacaccaagtccctctcactcacacacatgcgtccccacctcctcctcacccggctttgacggttggtgaatcagaggctgatctcatcccactcctgcctccctgacagcacagatgacgcatcctccccaaagccccccaggctgagcccacccatccctgcctcctcaacatcatagaggctctcgccctcctaaatcccccaagctgacactgtcccacccctgcctaccttatagcaccaatgcagtcccaactccccactgaatggaggaaggctatgtatttggggggctgagtacctcagcgcaggtgcccatgtagttgtagacactgagcgggatcttgacctgctccccacggatgatgagagcggggagcatgaagtccacgaagaagggcttgaaggtcttcagcagggagggctcggcgatgcctaagccctgagaggtggacagggccacggcctcacccacccagctggtgatggagtccgggaccttcacactgagtgtcccctcaccagatgggtcactgcggagagacagacagccatgatggggggcccttctccagggccatgcctcaggggggccagtgggcatggatgacccaggctgcatggctcagagaggcaccctaggagcttagaaacaagcattgaaggcatcacaaaagcggcaacaggaaaaaaactgtccctcagccctgactctaatagaaaacatgggctgggcgcagtggctcatgcctgtaataccagcactctgagaggccgaggtgggagactgcccgagcccaggagttccggaccaccctaggcaagatgatgagaccgtgttgctacaaaaaatttaaaaattaggtgggtatagtgacacatgcctgtaggcccagctactcaggaggctgaagtgggggattcacttgagcccaggtggtcgagggtgcagtgagctgtgatcccgccactgcagtccagcctcagcaacagagtgagatccctgtcacacacacacaaaaatattattgaaagaaactaaaaaagacaaaaaaagacataaataaatgaaaacatttcccatgttcatggatcggaaagacttgttaaaatgtcaaaactacccaaagtgatctatagattcaatggaacccctatcataaaccccaatgactttttattttattttattttgcagaaatagaaaactccaccttgagattttacatggatctcaagggatcctggtggccaaacaaagaaaccagaagaataaagctggagagctcacacttcaaaacttaccacaaagctaccatattcaaatcaatgtgttactggcataaagacagacatacagaccaatggaatcaaatagagagcccaggaataaaccttgacgacacagataaatgatttttgacaagggcatcaagatactttagggaaaagacaatctttttaacaaatactgctagaaaaagcaaacatccatatgcaaaagaatgaatttggaccttacctaacaccatatacaaaagttaactcaaaatgaatccatgacttgaaagtaaaaactaaaactataaaactcttagaagaaaacagggcaaaagcttcatgacattgggtttgacaatgatttcatggatatgaaaacaaaggtacaagcaaaaaaaaaaaaaaaagagtagacaagttggactttatgaaaactgcaaaattttgagcatcaaaagacactattcaagggctggcatggtagcttactcctgtaatcccagcactttgggaggccaaggaaggaggatcacttgagcccaggagtttgagaccagcctgagcaacacagcaagaccctatctttacaaaaaattaaaaaatttagccaggagtggtggtgtgtacctgtagacccagctacttgggaggctgaggttgggggatcacttgaacacctgggtgacagagtgagaccttgtctcaaaaaaaaaaaaaaaaaaggcactatcaacagagtaaaaagtcaacccagtgggagaaaatatttgcaagtcatatatctgataaggaaataatatccagaatatatagagaactcctgaaactcaataacaaaaacagcaacatgattcaaaaatgggcaaattacttgaatagacatttcaccaaagaagatagacaaatgactgataaatacatgaaagatgctcaacatcactaatcattagggaaatgcaaataaaaaccacaatgagatgccacttcatgtacttaattaggatattaaaaaagaaaaggcaagaaaaaaggctgggcatggtggctcacacctataatcccagcactttgggaggccgaggtgggtggatcacttgaggtcaggagtctggccattgtgaataacgctgtgaacatgggtatacaaatatccctttgagaccctgcttcccattcttttgggtatacacccagaagtagtgggtgaaaccccgtctctactaaaaatacgaaaattagccaggtgtggtggtgcgtgtctgtagttccagctatttgggaggctgaggcaggagaattgtgtgaacctgggaggcggagggtgcagtgagctgagattgcaccactgcactcctgcctgggtgacagagcgagactctatctcaaaaaaaaaaaaaaagaaaagaaagaaaaagagaacagcaagtgtttctgaggatgtggtaagattggaaccctggtacactgttagtagaaatgtaaaacgctgcagctgctgtggaaattagtctggaggttccttaaaaaattaaacataaaattaccacatgattcagcaattctacttctgggtatacacccaaaagaatgggaagcagggtctcaaagggatatttgtatacccctgttcacagcattattcacaatagccaaaaggtggaagcaactcaagggtccatcgacagaaaataaatggataaacaaaatgagggaatccatgcaataggatattattcaaccttaaaagggaaggaggctgggtacagtggctcacgcctgtaatcccagcactttgggaggccgaggggggtggatcacgaggtcaggaaatcgagatcatcctggtcaacatggtgaaaccccatctctactaaaatacaaaaaattagctaggcattggctgggcacggtggctcatgcctgcaatcccagcactttgggaggccgaggcgggcggatcacgaggtcaggagatcgataccatcctgggtaacacggtgaaaccccgtctctactaaaaatacaaaaaattagcagggcatggtggtgggcggctgtggtcccagctactcaggaggctgaggcaggagaatggcgtgaacccaggaggcagagtttgcagtgagccgagatcgcaccactgcactccagcctgggcaacagagcaagatgctgtctcacacacaaacacacaaaaatagctgggcatggtggcgcatgcctatagtcccagctatttggaaggttaaggcagaggaatcacttgaaccctggaggcagaggttgcagtgagccgagattgtgccactgcactccagcctggtgacagagcaagactccatctcaagaaaaaaaaaaaaaagagagaaggaaattctgacatggattctccaacaaagatgaaccttggggacatgttgaaataagccagtcacaaaacgacaaatactacatgattccacttacaggcggtccctagaatagtcaaactcagagacagaaagggttgttaccaaaggctgggggaagggaagagaggggagtgagtgtttaatgggacagagtgtcagttttgtaagatgaaaggagtcacagaaatgggtgatggtgatgttggcacaataacgtgagtgtccttaataccactgaactatacacttaaaaatggttaagatcgtaaattttatgtggagtatttcaccataattttttaaaccaattcatttttgaatcattttccctttttgagacagggtctcactctgtagcccaggctggagtgcagtggtgtaatttcgtgtcactgcagcctcaacctcctgggctcaagcgatcctcccacttcagcttcccaagtagctaggaccacaagcatgtgccaccacacctggctaatttaaaaattttttttagagatggggccttgctatgttgcccaggctggtcttgaactcctgggctcaagcaatcctcctgcctcagcctctcaaagtgctgggattacaggcataagccaccacaccccgcctttaaacgggtgtggtttaaaagagagttgaccagtcctcttttgggtccagcaggaacctcctccctggtctcagatctgtcccctctgattcatccttgctccagccaacaagagaggagagagaacatcccgaatcctaaatcccaaatccctggctctccacacctgcacccctaaccccacccccacagcccacatggtctcatactccctgcatcctcctcagctccttccatctcatttcaaccatgtggaaatccaccagcctctcctactttgcagcacttgctcatgctggtccttcctggacacccttccctttcttgcttattcatatggtgggactcagcttgggccctacattgaggaccctctctggcttttccaaaggattccaccatctttctctgcctcccaagctccatgcccagccttccagaagactaaccccactgcaccatgatggctctttaggcacctgtctactctagctacaatgaaaatgttatgagtgctgggactctgtctaccttattcaagggaccatccttaacatcaaaaacatccgggccaggagcagtagctcacacctgtaattctaacacgttgagaggccaagacaggaagatcacttgaggccaggagtttcagaccagcctgggcaacatacagagaccccatctctatgaaatatttttttttttttgagacggagtcttgctctgtcacccaggctggagagcagtggcgccatcttggctcactgcaacctccgtctcccaggttcatgccactctcttacctcagcctcccgagtagctgggactacaggcgcccgccaccatgcccagctattttttgcgtttttagtagagacagggtttcaccatgttagagagggtggtctcgatctcctgatctcgtgatccacctgcctcagcctcccaaagtgctgggattacaggcatgagctaccatgcccagccctaataaaagttaattgaaaaaattttttaacaataaaaaaagctcaccagacatccagaaagtagatacatttgaatgatgatggacagatagcctgtcttacagctgggcccccagaacaaaacacagtgaactggatgtgttctgatcagcagtcaaaccttcccacgatgaggacatacacatcccccaaagcagtctgaggggcccccagctgcgtgcctggctctgccaagcacttgccacagcaccttgtgcctggaggaagggcacagctccagcagtcagcccacctgctggcccgggctggaccaagagtcagttttcatgccaaactggtttgccggggcacgccagtgccactttttactagtgtcattggtgctctaacgctgagcattgcaagaaaaaaagtcaattgcatccagcagaaaagggttgcctacactcctgcttcaaagagaactaaacggggaaaaatgcagaaaggaaatgtgttgagaaaggcatcctgttttttgagcaagagctgtagtcccctgaggagcaaggagtgggggtaggtggagtcaagttcatgttccagggaactgtaatcattttaatgagctcgttatacaaacagagcagatagagtaaccccaagagggagttataagaggcacaaagcccttgcatttcatatttcacaggcaaacgtccaaatgtgcagcgggactcaaggctggcttcatggcttgaagttttgtgtgttagaaaaagatgcacagtgtcttgctcagatgttggtatcaggcctgcccatctcaccggaggctctctggacccgcatgagtgtctttcactcaaccggcaaagtcagcgcagaaaagaaatcttaatgtacctgatgttgagacaatgccaaatccatgtttcggggaagaaagtcctttttctcttctctgttctatgaaaagaaaaaaagaaacgattaaggtttcatgaacataacaaatcttatgtgaacctagcagctttgcattctatttgatcagatataacgcgttaatttcttttacctggaagggttaacattgtacttcactgggatataacatgttaattctcttacctggcagggttaacagtctacttgattaggacataacttgtttttttaaaaactttattttaggttcagaagtacatgtgcaggtctgttacataggtaaatgtgtgtcatgggggtttgttgtacagattatttcatcacccagatactaagcctatgcccaatagttattatttctgatcctctctgtcttcccatcccccatcctcaagtagacctgtgtctgttcccccttttgtttccatgtgttctcatcatttagcttccacttataagtgagaacatgcagtatttggttttctgttcctgcattagtttgctaaggataatgggctccagctccatccatgtttccacaaaagacatgattttgttcttttttatggctgcatagtattccatggtatttctgtaccacattttatttatccaatctgtcattgatgagcatttaggttgattccaggtctttgctattgtaaatagtgctgcagtgaacatttgtgtgcatgggtctttatggtagaatgatttatattcctttgagtatatactcagtaatgggattgctggctcaaatggtagtactgtttttagttctttgagcaatcaccacactgctttccacaatggttgaactaatttacactcccatcaactatgcatagcatccccttttctccactacctcaccaacatctgttatttttttactttttttttcttttttttttttgagatggagtttccttcttgtcacccaggctggagtgcaatggcacaatctcagctcactgcaacatctgcctcccaggttcaaacgattctccagcctcagcctcccgagtagctaggattacaggcgcctgccactacacccagctaattttgtatttttagtagagacgcagtttcaccatgttggtcaggctggtctcaaaatcctgacctcaggtgatccacctgcctcggcctcccaaagttctggaattacaggcatgagccaccacactcagcttatttgttgactctttaataatggccattctgactggcatgagatggcatctcattgtggttttgatttgcatttccctttttttttttttttgagatggagtcttgctctgtcacccaggctggagtgcagtggtgcaatctctgctcactgcaacctccacctcccaggttcaagtgattctcatgcctcagcctcctgaattacacctggaattgcaggtgtgccaccacgcccggctaatttttgtatttttagtagagatggggttttgtcatgttgaccacgctggtctcaaactcccgacatcaagtgatccacccgcctcggcctcccaaagtgctgggattacaggtgtgggccactgtgcctggcctgatttgcatttctctagttcagtgacattgaggtttttttcatatgcttgttggctgcacgtatattttcttttttttttttcgagatggagtctctctctgttgcccagactggagtgcaatggcacaatctcggttcactgcagcctccgcctcccaggttcgagcaattctcctgcctcagcctcctgagtagctgggattacaggcgtccaccaccatgtccggctaatttttgtatttttagtagagatggggtttcaccatattggccaggctggtctcgaactcctgaccttgtgatccacccacctcagcctctcaaagtggtggtattacaggcataagccaccacgcccggcctgcatgtgtatcttctttgaaaagtgtctgctcaaggatgtaacttgttaactcttttacctggcagcgttaacattctacttaagaatagaagaagcaaggtatcaaaggcttggcagagtccatctttaaacagtcgtgcctcctctcctggatgcagaagggataaaggcctgcaggggccaccctatatccctccctttgctaatttccctccctgggttttaccacgttcatcttcatcatcacactgaactctccacctcctgctcacccatcctctgtttcctaaggagtgccttcatgcattcttgtttgagcctcagaagcctcacagttcaccctcctcaaaggctgctccttctcctttctcaaaaaaaaaaaaaaggctttctcaaaatttggcaaaaataaaaatgctcctatcctttcaaccatcaacacctctcctaggagcagaccccggaaacacccgcagacgtgtgtgcaaacacagagagatggagtggttcatcgtggcactaggaaaattagcaaatagcccaaatctccatcattaggaggactggaaaatcaaatgatagtatattcattggtggactattatatatttgtaaaaaaaaaaaagagtgaggtaaacatgcatttactgatatggaatgatttccaagacttgttgttaactttcaaaagaaatgtacaaaatgacattatggtattcttctattctttttttttttaatcctacatatgcacagaagaatatctaagaaattattcagactgggcacagtggctcacacctgtaatcccagcacttcgggagactgaggtgggtggatcactggaggtcaggagttcaagaccagcctggccaacatggtgaaaccccctctctactaaaaatacaaaagttagccgggtttggtggtgcaggcctgtaatcccagctactcaggaggctgagacaggagtatcacttgaacatggaaggcagtgagctgagatcccatcactgcactccagcatgggcaacagagtgagactcctcctcaaaaaaaaaaaattattcagctttcccttctgaagaagggaatggagggtctgagggtgggaaggagacttaaatttcattatatatcctcttctactgcttgaaaaaaatgttaaccacatttacatggttaaaaaaatatgttggggctattccaagatggccaaataggaacagctccagtctgtagctcccagtgtgattgacacggaagatgggtgatttctgcatttccaactgaggtacctggttcatctcattgggactggttggacagtgggtacagcccatgaaggatgagccgcagtagggcggggtgtcgccttacccgggaagcacaaggggtcaggggatttccctttcctagccaagggaagccgggatagactgtacctggaaaaacaggacactctcgcccaaatactgagcttttcccatggtcttagcaaccagcagaccaggagattctctcccatgcctggctgggcgggtcccacgcccgcagagccttgctcactgctagcacagcagtctgagatcgaactgcgacgtggcagcctggttgggggaggggtgcccaccattgctgaggctggagtaagtaaacaaagtggctgggaagcttaaactgggcggagcccactgcagctcagcaaggcctactgcctctatagactccacctctgtgagcagggcatggctgaacaaaaggcagcagacagtttctgcagacttaaacgtccctgtctgacagctctgaagacagcagtcattctcccagcatggcgtttcagctctgagaacggacagactgcctcctcaagtgggtccctgacccccatgtagcctaactgggagacacctcccaggaggggccgacaaacacctcatataggcgggtacccctctgagacgaagcttccagaggaaggatcaggcagcaatatttgctgttctgcaatatttgctgttctgcagcctccactggtgatacgcaggcagacagggtctagagtggacctccaccaaactccaacagacctgcagctgagagacctgacgttagaaggaaaattaacaaacagaaaggaatagcatcaacatcaacaaaaaggacatctacaccaaagccccatctgtaggttaccagcatcaaagaccaaaggtagataaaaccacaaagatggggagatacaagagcagaaaagctgataattctaaaaacctgcgcgcctcttctcctccaaaggatagtagctccttgccagcaatggaacaaagctggacggagaatgactttgacaaattgacagaagtaggcttcagaaggttggtaataacaaacttctctgagctaaaggagcacgttcaaacccatcgcaaggaagctaaaaaccttgaataaaggttagacgaatggctaactagaataaacagcatagagaagaacttaaatgacctgatggagctgaaaaccatggcacgagaactttgtgacgcaggcacaagtttcaatagccgattcgatcaagtggaagaaagggtatcagtgattgaagattaaattaatgaaataaagcaaaaagacaaggttagagaaaaaagagtaaaaagaaatgaacaaagtctccaagaaatatgggactatgtgaaaagaccaaatctacgtctgattggtgtacctgaaagtgatggggagaatggaaccaagttggaaaacactctgcaggatattatccaggagaacttccccaacctagcaaggcaggccaacattcaaattcaggaaataaagagaacaccacaaagatattcctcaggaagagcaaccccaagacacataattgtcagattcaccaaagttgaaatgaaggaaaaaatgttaagagcagccagagagaaaggtcgggttaaccacaaagggaagcccatcagactaacagcagatctcttggcagaaaccctacaagccagaagagagtgggggccaatattcaacattcttaaagaaaagaattctcaatccagaatttcatatccggccaaactaagcttcataagtgaaggagaaataaaatcctttacagacaagcaaatgctgagagattttgtcaccaccaggcctgcctttcaagagctcctgaaggaagcactaaacatagaaaggaacaaccagtaccagccactgcaaaaatatgccagattgtaaagaccgttgatgctatgaagaaactgcatcaattaatgggcaaaataaccagctaatatcataatgacaggatcaaattcacacataacaatattaaccttaaatgtaaatgggctaaatgccccaattaaaagacacagactggcaaattggataaagagtcaagacccattattgtgctgtattcaggagacccatctcatgtgcagagacacacatagtctcaaaataaatggatggaggaagatctaccaagcaaatggaaagcaaaaaaaggcaggggttgcaatcctagtctctgataaaacagactttaaaccaacaaagatcaaaagagacaaagaaggccattacataatggtaaaggaatcaattcaacaagaagagctaactatcctaaatgtatatgcatgcaatacaggagcacccagattcataaagcaagtccttagagacctacaaagagacttagactcccacacaatactaatgggagactttaacacccctctatcaatattagacagatcagtgagacagaaggttaacaaggatatccaggaattgaactcagctctgcaccaagcagacctaatagacatctacagaactctccatcctaaatcaacagaatatacattcttctcagcatcacatcacacttattctgaaattgaccacataattggaagtaaagcactcctcagcaaatgtaaaagaacagaaatcacaacaaactgtcagaccacagcacaatcaaattagaactcaggattaagaaactcactcaaaaccacacaaccacatggaaactgaacaacctgctcctgaatgactgctgggtaaataacggaatgaaggcagaaataaagatgttctttgaaaccaatgagaacaaagacacaacacaccagaatctctgggacacatttaaagcagtgtgtagagggaaatttatagcactaaatgcccacaagagaaagcaggaaagatctaaaatcgacaccctaacatcacaattaaaagaactagagaagcaagagcaaacaaattcaaaagctagcagaaggcaagaaataactaaggtcagagcagaactgaaagagacagagacacaaaaacccttcaaaaaaatcaatgaatccaggagctggttttttgaaaagatcaacaaaattgatagaccactagcaagactaataaagaagaaaagagagaagaatcaaatagacgcaataaaaaatgataaaggggatatcaccaccgatcccacagaaatacaaactaccatcagagaatactgtaaacacctctacgcaaataaaccagaaaatctagaagaaatggataaattcctggacacatacaccctcccaagactaaaccaggaagaacgtgaatctctgaatagaccaataacaggctctgaaatcgaggcaataattaatagcctaccaaccaaaaaaagtccaggaccagaaggattcacagctgaattccaccagaagtacaaagaggagctgataccattccttctgaaactattctaatcaagaaaaagaaggaatcctccctaactcattttatgaggccagcatcatcctgataccaaagcctggcagagacacaacaaaaaaaagagaattttagaccaatatccttgatgaacatcgatgcaaaaatcctcaataaaatactggcaaacaaaatccagcagcacatcaaaaagcttcttatccaccacgatcaagtcagcttcatctctgggatgcaagcctggttcaacgtacacaaatcaataaacgaaatccatcacatagacagaaccattgacaaaaaccacatgatcatctcaatagatgcaaaaaaggtcttcgggctgggcacggtggctcacgcctgtaatcctagcactttgggaggctgaggcaggcagatcacaaggtgaggagatcgagaccatcctggctaacacggtgataccctgtctctactaaaaatacaaaaaattagccgggcatagtggcgggcgcctgtagtcccagctactcaggaggctgaggcaggagaatggtgtgaacctgggaggcagagcttgcagtgagccgatatcgcaccactgcactccagcctgggtgacagagtgagactccatctcaaaaaaaaaaggtcttcgacaaaattcaacagcccttcatgctaaaaactctcaataaactaggtattgatggaatatatctcaaaataataagggctatttatgacaaacccacagccaatatcatactgaatggacaaaaactggaagcattccctttgaaaactggcacaagacaaggatgccctctctcaccactcctattcaacgtagtgttggaagttctggccagggcaatcaggtaagagaaggaaataaagggtattcaatcaggaaaagaggaagtcaaattgtccctgtttgcagatgacatgattgtatatttagaaaaccccatcatctcagcccaaaacctccttcagctgatatgcaacttcagcaaagtctcaggatacaaaatcaatgtgcaaaaatcacaaaaatcctatacaccaattaacagacaaacagagagccaaatcatgagtgaaatcccattcacaattgctacaaagataataaaatacctaggaatccaacttacaagggatgtgaaggacctcttcaaggagaactacaaaccactgctcaatgaaataaaagaggacacaaacaaatggaagaacattccatgctaacggataggaagaatcaatatagttaaaatggccatactgcccaaggtaatttatagattcaatgccatccccatcaagctaccaatgactttcttcacagaattggaaaaaactactttaaagttcatatggaaccaaaaagagcccacattgccaagacaatcctaagcaaaaagaacaaagcgggaggcatcacgctacctgagttcaaactatactacaaggctacagtaaccaaaacagcatggtactggtaccaaaacagatatatagaccaatggaacagaacagaggcctcagaaataacaccacgcatctacaaccatctgatctttgacaaacctgacaaaaacaagaaatggggaatggattcgctatttaataaatggtgctgggaaaactgggtagccatatgtagaaagctgaaactggatcccttccttacatcttatacaaaaattaattcaagatggattaaagacttaaatgttagacctaaaaccataaaaactgtagaagaaaacctaggcaataccattcaagacataggcatgggcaaagacttcacgactaaaacaccaaaagcaatggcaacaaaagccaaaatagacaaatgggatctaattaaactaaagagcttctgcatggcaaaagaaactaccatcagagtgaacaggcaacctacagattgggagaaaatttttgcaatctacccatcggacaaagcgctaatatccaaaatctacaaagaactcaaacaaatttacaagaaaaaaacaaacaaccccatcaaaaagtgggcaaaggatatgaacagacatttctcaaaagaagacatttatgcatccaacacatgaaaaaatgctcatcatcactggccatcagagaaatgcaaatcaaaaccacaatgagataccatctcatgccaattagaatggcgatcattaaaaagtcaggaaacaacaaatgctggagaggatgtggagaaataggaatgcttttacactgttggtgggagtgtaaattagttcaaccattgtggaagacagtgtggcgattcctcaaggatctagaactagaaataccatttcacccagcaatcccgttactggatatatacccaaaggattataaattatgctactataaagacacatgcacacgtatgtttattgtggcactattcacaatagcaaagacttggaaccaacccaaatgtccatcaatgatagactggattaagaaaatgtggcacatatacaccatggaatactatgcagccataaaaaaggatgcgttcatgtcctttgcagggacatggatgaagccagaaaccatcattctcagcaaactatcacaaagacagaaaaccaaatactgcatgttctcactcataggtgggaactgaacaatgagaacacctggacacagggcggggaacatcacactctggggcctgtcggggggtggggggccgggggagggatagcattaggagtaatacctaatgtaaatgatgagttgatgggtgcagcaaaccaacatgggacatgtatacctatcaaacttgcacattgtgcacatgtaccctagaacttaaagtataattttttaaaaaaagaaaatacatatataattaaaaatatatggccaggtgcagtggctcatgcctgtaatcccagcactttgggaggccaaggctggcggatcatgaggtcaggagatggagaccatcctggctaacatggtgaaaccccgtctctactaaaaaatacaacaaaaattagccaggcatggtggtgggtgcctgtagtcccaggtacttgggaggctgaggcaggagaatggcatgaaaccggtaggcagagcttgtagtaagccaagatggcgccactacactccagcctgggcaacagagtgagactctgtctcaccaaaatatatatatatatgtatatatatacacacatatgtgcgtgtatatacttgtatatatgtgcatatatacacacacatgtgtgtgtatatatgtgcatatatacacacacatgtgtgtatatatatacatgttgctctcagaataaggatgtgtttgttccaattacaaaaaagcatgggcacttgattttgaaggcatttcttatgcctttctccattgtgatttacaattgccttcatggttttgagttttacaaagctgctgcttctataccagccccaggacaagctctcaggggttatgcatgtgagtgggtcagggcctctggggtggctgccagctgacagaggccctggggccagcattccaatcttcctcatccaatcacatcttgaaatgcttccatgtgtatccaaactacagtatgaagcctaatctgccaattccccgattaggagttgggaaactaggaaccctgtaggcctgctaaacgtgtggccccagcaggaagagcctgggggactgaagcatccaggagccactggggagcagacggaggggcacaagaaggttcctgttttatatagagagggcttgaaagatggagaacacttccatggacaggctcatcagggctggccaccaaatcaagaggtttcctggacaggtcatacatcaaaatgggcatcattccaaaagttagaacctatttggcagtgagcaatactggaaatacttcatagcacaatgtgactgcagccaaagcagtactcagaggaaaattcataatcctctaatggcttaagtgtttttatttatttatttatttatttttaaattagagacagagtctcactctgtcactcaggctggagtgcagtggcacaatcacagctcactgcagcctcaaccttcccaggctcaagcaatcctccagtctcagcctcccaagtagctgggactacaggcatgagccaccacacatggttaatttttgtatttgtgtagagacaaggttttgccatgtgcccaggctggtctcaaactcctaggctcaagtgatctgcctgccttggccttccaaagtgctggggttacaggcatgagccactgtgcccagccaagtgtttatatttaagatgagaaagactgaaaagtaattactttgtgtcaactcatgaaggtagagttggagaagaaggagaaacagagtaaaaggaagaggagggaaggatgagaggaaggagaaaggacaaaataaagaactctctaaacagagtctctgagagttgggagatcaagccccaggttctcaccctgcccagatccctctgtcctcagacaggtcagctctcctgattcattttcttctctcttccatatccctaatcttgtgcactggggtagggctaagaattgggtagggaggaggtatatgaagcaatcagtgtcctagcctgctatgccaatggcccccagggaacattgggcaatgtctggagatattgttggttgttacaactgggaaggagtgtgactgacatctagtgggtggaggtcagggatgctgctcaacactctacagtgcagaggacacccctcacagtgcacagaataatcctaccctgcaatggactcaatgtttgcatccccctgaaaattcatatgttcaaatcttaacctccgaggtgatggtgttgaggtgaagcttctaggagatgatcaggttatgaaagtggattgctcatgaatgggattagggcccttataaaagggactctaggccgggtgcagaggctcacgcctgtaatcccagcactttgagaggccacagcaggcaaatcacttgaggccaggagtttgagaccagtgtgcctaacatggtgaaatcctgtctctactaaaaatacaaaaattagctgggcatggtggcatgtaatcccagctactcaggaggctgaggcaggagaatcacttgaatctgggaggtggaggttgcagtgagccaagctcgtaccactgcactccagcctgggcaacagagccaggctccatctcaaaaaaaaaaaaaaaacaaaaacaacgaaaaacttactaatagcagttgttaatattatactttaaaaacacctattattgccaggcgcagtggctcatgcctgtaatcccagcactttgggaagccaaggtgggcgaatcacaaggtcaggagatcgagaccatcctggctaacacagtgaaaccccgtctctactaaaaatacaaaaaaaaaaaaaattagcggggtgtggcgggcgcctatagtctcagctactcaggaggctgaggcaggagaatggcgtgaacctgggaggcggagcttgcagtgagctgagatcgcactactgcactccagcctgggagacagagcaagactctgtctcaaaaaaaaaaaaaaaaaagaaagaaagagagaaagacacctgttatttagttaaaattttcttccaggccaggtacagtgactcacacctgtaatcccagcactttgagaggctgcggcaggcaaatcacttgaggccaggagttcatgaccagcctggccaacatggtgaaaccctgtctctactaaaaatacgaaaattagacaggcatggtggcatgcctgtaatcccagctactcaggaggctgaggcaggagaatcacttgaacctgggaggtggaggttgcagggagccaagatcacaccactgggggtgtggtcacacagcctgggggacagattgagtgagactccatctcaaaaaaaaaaaggctccagagagctccctcactccttctgccatatgaggatacagcaagaagccagagggcaccatcaatgaagcaggaagtgagccctcaccagacacccaatcagctggtgccctgttcttggacttccaagccccaagaaccatgtgaaataaatttcagttgtttataagccactcggtctatggtcttctgttatagcagccaggaaggacaaagacaagccccagatgttaataggaccagggttagaaaaccttgctcaatgtataagccgttacctgggggggtgcctggaaggagccactgccaccaggctccctgtgtggggctggaaagcggggacagcctcatcggtgtagaggccaccgtcctgccggtggttcaggctcactcggtcggtcatcaccaccagtcccgtttcctaggcaacagacaacacccaaaccattggtggggaagtggatgctgacagcccccagaagcataagggaatgaatcaccctgtggccactgtcccaatatcagcttgtggcaaccttgggggcatcattctttttttgcttttttgggtttgttttgttttgttttgtttgtttgttgttttttgagacggagtctcgctctgtcgcccaggctggagtgcagtggcgcaatcttggctcactggaagctccacctcccaggttcacgcctatctcctgcctcagcctccctagtagctgggactacaggtgcccgtcaccatggggcatcattcttttactctgggtttggtggcacaggctggggagaacgtgggacccagtgaccatccagggtggagaagagagaacagcacatttgaactgtgcaaccaaatcagatggtccaaacacaaaaggccatatgttgtatgattccgttgagatgaaacgcccagaacaggcaaatccatagagacagaaagcagatcaactggtgactgccaggggctgagggaggggaaatggggagtaattgctactggggatggggtttccttttgggggatgaaaatggtctggaattaagtaggggtggtggttgcacagcactgtgaatataataaatgccactgaattttaaacggtgagttttatgttatatgaatttcatctcgattagaaaaatcatggccaggcatagtggcacatgcctgtaatcccagcattttgggaggccgaggtgggcggatcacttgagatcaggagttcaacaccagcctggccaacacggtgaaaccccatctctactaaaaatacaagaattagccaggcatggtggtgggcacctgtaatcccagctacttgggaggctgaggcaggagaatcactggaacccaggaggcggaggttgcagtgagccaagatcacaccactgcactccagcctgggcaatagagcaagactccatctcaaaagaaaaagaaaagaaaagaaggaaggggaagtgaggggagagcaggggaggaaatcagttggcgcagtacctgaccccaaccaaggaccaacggtgggatgcaatgatctcttttattagtattagtattattagagacggcctccatctgtggttcaggctggggtgcagtgctgcaatcatagctcactgcagcctcaaactcccaggctcaagtgatcctcccacctcagcctcttgagtagctgggactagaggagtgcaccaccatgcccggctatgcaattagtctttttattctgtcctcatcattgtactaattactgggagcaactggatttgaaagaagactcactgtagcctgggctgacttggatttgtgaacaagaattttttttttttagacggagtctcactctgtcgcccaggctggagtgcagtggcgcgatctcggctcactgtaagctccgcctcccaggttcatgccattctctcctgcctcattctcctgagtagctgggactactggcgcccgccaccacgcccggctaattttttgtatttttagtagagacggggtttcactgtgttagccaagatggtctcgatctcctgacctcgtgatccgcccgtctcagcctcccaaagtgctgggattacaggcgtgagccaccgcgcccagcctttgaataagaaattcaaacccagttcctttgactcaaaggcgtcacctctgacttccagaagggacctggagttcaaactgccaggcagttcacatactcataaatgaaatgttatttttcaaaacaaaaaacaaaacacaaaggtttattttgccaggtacagtggtgtatgtctgtaatcccagcacttcgggaggctaacgcgggtggatccattaagcccaggagttcaagactagcctgggtgacatggtgaaaccccatctctataaatacgaaaaaaattagcgaggcatgatggcgtgtgtctgtggtcccagctactcaggaggctgaggcaggaggatcgcttgagcccaggaggtcgagactgaagtgagctgagatcacgccactgcataccagcctgggtgacaaagtgagatcttgtctcaaaaaaagaaaaataagagatttttttgtttgtttgttttgtttttagcaaatagaactgtgggaactaggtggcaggcatgtgggtatttgtctaattcgctcaacttttctgcatgtttggaaattttcatcataaaagcaacacaggttggggagggaaggatgcctttgaaattttatttatttatttaatttcatttttttgagacagagtctcgctctaccacccaggctggagtgcagtggcgtgatcactgtaacctccgcctcccagttccagagcttctcctgccttagcctcccgagtagctgggattacaggcgcccaccaccacacccagataatttttgtatttttagtagagacggggtttcaccatgttggccaggctggtctcgaactcctgacttcaggtgatccacgtgtcttggcctcccaaagtgctgggattacaggcgtgagacaccacacctggccagaaatattttttaaagctgaaatgaaaggcaccctccaatgggacacgcatttgagtggagaccaccagcaccctaaggtgtgaccctgaagggcgaagcatgctcccatcccaatccctttctatctatatcacatcatgaaaacgtccagagatgggcacctgatagcattagccctttttttttttttttttttttgagacggagtctggctctgtcaccaggctggagtgaagtgatgtgatctctgctcactgcaacctccacctcccgggctcaagtgattctcctgactcagcctcccaagtagctgggactacaggcatgcaccaccacgcccagctaattattgtgtttttagtagagagggggtttcaccgtgttggccaggatggtctcgatctcttgaccttgtgatccgcccacctcagcctcccaaagtgctgggattacaggcatgagccaccgcgctcagccagcattagccctttttttttttgagacggagtctcgctctgtcgcccaggctggagtgcagtggcgcaatcttggctcactgcaagctccgcctcccaggttcacgccattctcctgcctcagcctcccgagtagctgggactacaggcgcccccttagccctttttaagatgggtaaactggagctgggcacagtggctcatgcctctaatcccagcgactagggaggctggggcacgaggatcacctatgcagttcagaccccctgccacctgggatcacagccacctccttctgcttgaaagctgccagacacacaaccaagttaaccaaagccgaggcagagctaagagctactggcacccacagctcccaatgagaaggttttcctcgcagcaaagcacgtcaatgtcataacacgtcccatcacaagttcaagttacccatttgaacctgaccattgacatgcataacattctgctctccacggctttgcaaattggaagaatctacttgtgagctttcactggggagaaatgaaaaagaaaagtttggaaggctgggtgcaatggctcatgcttgtaatcctaacactttgggaagttgaagcaggaggattgcttgaggccaggagtttgacactagccagggccacgtagcaagaccccatctctacaaagaaataaagcaaaataaaattagccaggtgtggtggcatgcacctgtagtgccagctacttgggagactgaggtgggaggatcacttgagcacaggtgtttgaggctgcagtgagctatgatcacaccactgcactccagcctgggccacagagcgagaccccatctcgaaaaaaagaaagaaaagcttccaattctgtttccaacccatttctgaatctccaagactcttatttctaggcaagaggaacttagaagggggcagagggatctgagaccacctctccttacggtgaaggcaaacccagagtccttggtgatgccccaaggccacgggaagacagaggagcgccggcgtcgttgtgccgtcagcccagcccaccaaaaaggaccatcctccctggacacgccaaaggaatcagaaacatcataatcttccagttcctggaaaacctgcaggcaaagggggacagagacttgtcagctgaagttttctttacaacccaaactggctcccgtgggtgtggcatgctcccatcccaacctctttatcacgtcatgacaacctccaggagatgggcactggtagcatcagcccattttaagatgggcaaacaggagccaggcacagtggcccatgcctctaatcccagttactggggaggctgaaacaggaggctggcttgtgcaaaggagttcgagaccagcctgggcaacatagcaagaccccgcccctacaaaagatagaaaaaattagccaggcgtggtggtgcatgcctgtagccccagctactctggaggctgaggtgggaggatcgtttaagcccaggaggtgttcgctacagtgagctatgatcacgccactgcactccagcccaggcaacagagcaacatcccaactctaaaaataatataaaataagatgggcaaattggagccagagaggtgagacctggcccaatgtcatgttgcaaaaatctgatgaccttgactccctgatcttgcaactgtgctgaagcagcaggaaggatttatcagacacccattaggttccctgaaaaatgaacccgacggagaaagcgaatctggattcaaatgccactcttcatttattggaatgagagatgggaaagggagagcaagagaaggtaaagccccgtggaggtctagaacccaagcccgaggggtctgctcacctgggcaggagtcagccggaacccagacctgagcaggtagacactcttatcaactgcggcgacgcacacacagctgccccttgcagccctgatccgcaggtcgacaacctccccaggttgggtctcatttgctgaatacgtcactgaaaccttggcgcaaatgcagcaagggataagaaacttggttcagttggctgtgagtggtggctcacgcctgtaatcccaacactttgggaggccgaggcgggtggatcacctgaggtcaagagttcgagaccagcctggccaacatggtgaaaccccatctctactaaaaatacaaaatttagctgggcatggtggcaggtgcctgtaatcccagctacttaggaggctgaggcaggagaatcgcttgaagcccagagacagaggttgcagggagctgagagagtgtggttgcaccccagccagggcaacaagaatgaaactccatttcaaacaatgaaaaaaagaaacttggttcaatccaggtttggtctagtccagaggcatctcttctgccccacccatgcaccccctgcccaccaaggagagtgggtctttgccagctcagctgggaacctggcctcgctacctgggtgaaactggtcccacactgtgaagggcagctggtcattgtgcagcgggcacaaagaagggaacacagagggacaggcagagatgggaaggcaggtgctggcggagagcctgtggcagtttgtttacaagttgcagggaggagccaggcgcagtggctcacacctgtaatcccagcacttcgggaggctgaagcatgtggatcacttgaggccaggagttcaagaccagcctggccaacatggtgaaaccccatctctactaaaaatacaaaaattagccagacatggtggcacatgcctgtagtctcagctactcgggaggctgaggccggagaattgcttgaacccgggaggcagaggttgcagtgagccgagatcgtgccactgcactccagcctgggtgacagagcttgactccgtctcaaaataataataataataataaagttgttgcagggagggggagaggaggctgagggtgccaatggaaacaagtgctgtcccttaaatcctgaattcaacaaaggcagagaataattgatggctttccccatgtgttttgaatgcaatctccttttgtgtgacttttggagatgcttcagtaaagatgcaactcatgttcccataattccttacatcatgctgcgacacaacatgagtctcaggtgtgcacagaccccctggccagcaccttggagaagccccgatggcccctggctgtgtcccaggttcagtgcacgatgctctacctggttttcgaagaaggtctcgactgcaaactgaaggctgtcggcgaccccttctccattctccctgacgtagaagaccagcaggcgaccaagggggaccatgctgggggtcacggccagatgaagagaggtcacacacacgtcgacctcagcttctggggctggtgggggctctgaggtgagcaaaagtagagagaggtggtgaattctccgcatccgacatgcaacctcagccattcaggctctgccccaatttgccctgcgctatgctcctgtctacgcattgagacagtctgcatctttggttttgagatgcccttcccaggctacatcctcagtcaatgctgactctttctattgactcagctctagggtcaccatgggctcctacagagcaggctggaatttgcctagaatcatcctctctgccggggaacatggtccctgctccctgaccagccctctgcttcctccgcggacaccaaaaccaccttggcttgtccaggcagcaccactgcagctccccaatatgcccctgacctccagtccctccctctgattggctctgtcttgctggggcctggggccagcagacctgggcagccattatttgctgacttgaaccgagttcatactgccttccctgtgggtaaatgatccttaaaggatagaggatcttagaagcctgtccaggcactcccaaatactctacggcaagagaatgagggtagaaaggctcccagttccagaatgggccatctgtcagctggttctgtgcagagctcagagcagccagtggacagggatggtaggggaaagcggggacacaaggaaactcatgggcaacaggaggaagtgggtacccaatcggccttggggttcaaatcttggctctggcccctactaggcaatgggaaagtccctgaaacccccacccccaagtcacagcccattcatctgcagatggacacagtggaaccaccaccatcccaggctgcagtggggttaaatggggacagattgtggggagttccaagcccagggctggccctggacaaggattccagggagacataaagtccctgttatttcacccagaagagaagagaagaccaagagggtgaaggtgcaccatgcccaaagcaggactctggccagcagttctcagccaaggcaattctgctacccaggggatgctggcaatatctgcggatgttttttggtcatcactgctggaggggatgctactggcttccggtgaatagaagccagagatgctattcagcatcctacagtgcatgggatggtcccaaatgttgacagtgcagagggtgagaaagcctgcctaagaaggagggatcttctctgtctgtctatctatccatccatccatctatccactcatctttctatctatccatccatccatctcttcatccatccaccatctacccatccatccactcacccaccatccacccttccctctattcatcaaccatccatcatccacccatccaaccatccacccatccctctattcatcatccatcatccacccacccaccatccatccatttatccatccatcatccacccacccatccaccatccaatcatctatccatctgttcatccatccatctgttcatccatccatcatccactcatccacccaccccactatccatccatctattcttccatccatcatcccccattcatccacccactatccatccatctatccatccaaccatccatctattcatccatccatcatccacccatccacccactatccatccatccattcatctattcatccagtcatcatccgcccacccactatccatccatccatccatctattcatctaatcctcatccacccacccattagccatccatccatccatccttctgtacctccatccatctattcatccatccatctattcatccagccatccatctgtccattcatccatccatctgtccatccatccatctgtccattcatccatccatccatccatccatccatcttttggtccatccatccatccatccatctatcaatccacccatccatctgtccattcatccatccatccatccttctgtccatccatcttttggtccatccatccatccatccatctctctgtccattcatccatctatccacctatccatccatccatccatccttccatctatccactgttctatcagtccatccatccatccatccattcatccatctttctatctgtccatccatccattgatccatccctctatcatctatagggctattggcatctatggggtggaggccagggatgctgctcaatatcctacagtgcctccaccacagagaatgatcttgcccaaatgttgatagtgccaaggttgagaaaccttgccttcgcctgagagatcctgcctatctatctatccacccatcattctgtctatctacctacctatctcagtgtcctcacctggaagtgactctgccccctggggatagtggcaatatctggagactctttaggtcatcatactgtggaaagttggtactactggcatctggtggggagagaccagggatgctgctcagcaccctacagtgcacaggacgcccccactctggagtgatccacccccttatatatgtctatagtgctcaagttggggaccctgtattgagaagaagagctttgaagaggaggggactaaggaagtcccctgggaggagggccttatgaggagcacatggtgtcaaaaagagaagaggaagaggactcataggcagaaccgcctgggcaaagaggcaacagcacaatgtgggccagtgcaagagcctagtctgtggctggctttccctgtcccctgcacacacagagtgagaagagtctggggcctgaacctctccacttccagcagctgatcactgtcttcctggacccagtctggtattgttaaggatgtgtcccctctgacccaaggcatgctcccctctctgctgggtcttgccttgtccctccttgcaggagcacccatctcagtctcaattgttcagaaggaagaacaggaaccttctccctgctgcccggctcacctgtctcagaaaggtgtgttaaacgaatcggtttctccagggcaggggccgcccgcttgcttcgctgctgggtggtgtgggcaggctgctggcccgatagcacaatattgccccgtgcagccacctcgtagtacagggtaaagttgcagggacatgtggacttcacagaaaaataggcttcttccccaacctatggaagacacgcagcatggggggctctgcctcgcaccaatgttgcaacccaccacaggaagacggccattctggggccagagggaggttgggatggctgagggagcggagtgcccagcatccagtcctggcccctagcttttttgttttttgttttcttttttaagatagtgtttcactcttgtcacccaggctggcatgcgatggtgagatctcagctcgctgcaacctctgcctcctgggttcaagtgattctcctgcctcagcctcctgggtagctattacaggcgcccgccaccatgccggtataatttttgtatttttagtagaaacggagtttcaccatgttggccaggctggtctcgaactcctgacctcgtgatcccagtattttgggctcacgcctgtaatcccagcactttggggggctgaagcggacagatcgctcaagtccagaagttagagagcagcctgagcaacatagtgagacccccatctctacaaaaagcacacacacataaaattggccaggcgtggtggcacatgcctgtagtccccgctactcagggggctgaagtgggagggtcacttgagcctaggaagtcaaggctgcagtgagccatgatcgcaccactgcactccagcctgggtaacagagtgagaccctgtctccaaaaaaaaataaaaataaaatactgtttcctaactttgaacgtgctaatgccacaagtgggctgggccttctcttaggatatgaactcaatgagttgggtcctatcatagtccccaagttcctagaggggaaaactggaaactgaggccttggttctttgcccaatgtcaatgagtgtagggcaggattcaaactcaggggaactgatgctaaggccccacattgaaccctgaagctgccattattctgatatcaggaaagctaaggcctcccaggtcctaagatctccctagggggttggcgtgtggccatgtccaacactttgccctaggaatcccgcctctgttccatgttttgcaatctgtgactgtccccaaatgttgggatcaccctgaaagcccagaagagggatatctggagtaggggaagagtgacattcttgccgtggaagcttgggcaaatcatttcacctctctgagcctcagtttccccacctgtaaaataaggctgttatctcctggacagagggtcctgaggctccaatgagatgatgtgtgtgtcatgctcaacatcacacaatgcacactgtaggtggctaataagtgtcattctggccaggggccatggctcacacctgtaatcccagtattttgttaggctgaggtgggtggatcacttgagcccagaagcttgagaccagcctgggcaacaaagtgagatcccgtctctacaaaaaatcaaaaaactttggccaggcgcagtggctcatgctttgtaatctcagcacattgagaggccgaggcgagaggattgcttgagtctaggagttcaagacccgccacagcaacatggtgaaaccccatctctacaaaaatacaaaaattaggtggatgtggtggtgggtgcctgtggtctcagctactcgggaagctaaggcggaaggatcacttgagccagggaggtcgatgtgcggtgagtcatgatcatgccactgcaccctagcctgggcaacagagtgagaccctgtctcaatcaatcaatcaatattttttaattaaaaaaatatatagtaagaaaaataaatgtcattctacctccccctaaaggaagaatctgcctgtttaagaagctgggcctaagggactcccacagccaaatttggaaaatttgagcagcaaaaagaagaatgtcagctgagtgtggtggctcatgcctataatcctaacactttgggaggctgaggcaggcagattgcttgagttcaggagttcaagaccagcctgaacaacatggcaaaactccatctccacaaaaaataataaaaaaaatagctgggtgtggtggcacaagcccatagtcccagctatctaggggggctgaggcaggaggatcacttgagcacaggaggtcaaggctgcagtaagccatgactgtgccaccaccctccagcctcgggtgctatggtttggctgtgtccccactcaaatctcatcttgaattgtagctcccataattcccatgtgttctgggagggacccagtgggagataactgaatcatggggacagtttccccaatacagttctcatggtagagaatgagtctcgtgagatctgataattttataaggggttttccttttcacttggttcccattctctcttgtctgccaccatgtaagatgtacctttcaccttctgccatgattgtaaggcctccccagccacgtggaactgtgaatccattaaacctctttttctggctgggcatggtggctcacgtctgtaatcccagtactttgggaggccaaggcaagcggatcacctaaggtcaggagttcaacaccagcctccccaacatggggaaagcccatctctacaaaaatacaaaaattagcaaggcacggtggcaggtgcttgtaatcccagcccaggaggctgaggcagcaaaattgcttgaacctgagaggcagaggttccagtgagctgagattgtgccattgcactccagcctgggtgacagagtgagactccatctcaaaataaataaataaataaataaataaataacaataaacctatttttctttataaattacccagtcgtgggtatgtctttatcagcagcatgaaaacggactaatatactgagtgacagagcaagaccctgtctcaaaaataaattaattaaaaacaaagaaaggaaaaagaagaatgtcaaggtcgtgaaagacaaggaaagaataaaattttcagattggaggagaccaaggagacgtgatgactaaatgtgacgtgggaccctaaaggtgatcccggaccagaaaacaaggccatgagtgggataacttggggaaatccaaataaaatctggagtctggttaacactgatgtccagtgttgattcttagttatgacaaatggatcatagtcttgtaagatgttagcattaggggaagcctatcaaaatctcaatggccttttttgcagaaatggaactgatcttaaaatttatatgaaaacacaaaggactcaggaatcttgaaaaagaagaataacattggaggactcacacttcctaatttcaaaacttactacaaagctacagtaatcaagacagtgtagtaccagcataaggagagacatagaaaccagtgggatagaagtgagagccctgaaatgaatccagacagctaagggcaactgatttgaaataagggtgccaagaccattcaatggggaaagcatagtctttttaacaaacagtgctgagacaactgaataggtacatgcaaaagagtgaagttggtctgtgggtggtggctcacacctgcaatctcaacactttaggaagctgaggtgggaggatcacttgagcccaggaggttgagctgcagtgagctatgatcacactactgcacctcagcctgggtgacagagcaaggtcctatctcaaaaaaaaaaaaaaaaaagagagagagagagagagagagaatgaatttggatccctacctcacaccatataaaaaaattaactcaaaacagatgaaagacctaaatgtaagagctgaaactataaaactcttaaaagaaaacacagagataaatcatgaccttagatttggcaatggtttctttgagatgtggcatcggaagtacaagcagcaaaagaaaaagagaaattggatttcatcaaaattaaaattttttgttgcactaatggacactgtcaggaaagtgaaaagataacccatagtataggagaaaatgtctgcaaattacacatctgatgagggctagtatccagaatttagaaagaactttcacgactcaacaaagataaacaacccaattattaacagtagtggggctgggtgtggtggttacatctgtcatctcaacaccttgggaggctgaggcagagaggatcacttgaggccaggagttcaagaccagcctgggcaacatagtgaaacccctaaaaaccaagtacatacacatgggtgagcatgcacacacactcacacaaatgcacatgcacactcatgtgtagtcacacatgtgtgatacaatcatgcagtcacatatgcatgcaaacaaacactaaatgtaaattacatttttagggtacccattgaaaatctgaatattgcctatgaattagacaatataatttggtgaatgtaattttcttaggtgtgacctaagaaaatggccttgaggtcaggtaaaataatgcctttttttaagtatacattatggtcaagtatttaagagtgaagcactatcatgtttgtaacttgctttcaaatgctgcagccaaaaaatgtgtagagaaatagatggatgcgtgaattggcagatggatggatggatgaagggagggatagagggagaatggatgaagggagagtggatgaatggatggatgaagggtgcatgtatggatggatggatgaagggtggatgaatggatgaagggcggatggatggatggatggatggagggtagataaataggtaagtgtagtgggtggatggatgggtggaggaaagaaagaaaggaggaaaagaaggagggagagagggtagatggatggatggatggatggatgaagggtggatgaagggcagacggaaggatggatggatggatgataaatggataggggtagtgggtggatagatgggtggagaaaggaaggaagggaaggaagaaaggagggagggagagtaaatggatggatggatgatggatggatgaagggaggcgcagagggagggtggatggatggatgaatagatagatggaggatggatggatggatgaagggtggatggatggagggaagatgagtggataaagggtagtaggtggatggatgggtggagggagggaggaagggtgaatgaatggagggagagaggatagatggatggagggatgaagagagggacagatggagggatggagagagagatggagggtggatggagggatgaatgaaaggatataggcaaagcattaatttataaatctaggtgaaagtctcatggttgtttattatattaacatttttcaatttcactctaaatttattaatgtcccccttataaaaagacacccaaacagaagtccccttctgcttgagatcttggggggaaaaggagagcacaaacctttctcctcttctttactaaatttatggcatcaaaacaaccttaaaagattggagtgagcgcccccattcaccaagcaaaacaggttcagaaggatgggtgccaagatgtggggagtggagccccccagttcccccctgccggggccctggcgctagaagaagaggaagaggtccctgcaccatgcccagcctggccccagcatgaacccatcttccctccatgccctgaggttgtgcccgggcccctcatggcagtttggtgggtaggacgcgctggggtttctgagccacctcaaacaggattgagattcacccggggagcaaaatctgagtgacagagccaggtctccccctaatcagaacaacagtctggccagctgagaacacaaggttccttcctgtcccctgaggaggaggccagcaccagcgtccccaccctgcaccactggtttaatggaattacaagaagaacagtgtgttcagccaagctgggcatgatcctgtctgacttctcattcttacaacctctgcaaagggctgttaatcccaggaaacaggcagccttggcgccacgattcctccaagctgaaccccaggggcctcgatatgatcagaaaaggagtgtgagaggtttatgggctggtagggccctgggcgctgtgatggcaactggtttccattaggggtgacatttctgccaaggctggggctatagcttgagccagaggctctgctgggattgcggccaggatgcaaacagcccagccagtgagcctgccaccagtccacaaagttaacagaggggtgatgtatcttaaatatagatgtgtatggccaggcgcggtggctcacgcctgtaatcccaacactttgggaggccgaagagggtggatcacctgaggccaggagttcgagaccaccctggtcaacatggtgaaaccctgtctctactaaaaatacaaaaataattagccaggcatggtggcaggtgcctgtaatcccagctactcgggaggctgaggcaggagaagtgcttgaacccaggagatggaggttgcagtgagccgagattgtgccactgcactccagcctgggagacagagactctgtcaaaaaaaaaaaaaaaaaaaaaaaaaaaatatatatatatatatatatatatatatatgtatatgtgggtatctagatgtctatgaacacacatgtacacagcatatccatatatatgcacatatatacagttgacccttgagaaatacaggtttgaactgcccacaacactgatgtgtggattttcttccacctctgcccaagcaagacagcaggaccccctctcctcttcctcctcctcctcagcctactgaacgtgaagatgacaaggaagaagacctttacaatgatccattcccacttcacgaacagtcaagatattttctcttctttatgattttttttacctgcgcctgccagcgtaagaaaatcttatgattttcttaataatattttccttcctgtagcttacattattgtaagaatacagtatatcatgcatagaaagtacaaaatctgtgttgattgactctggccaatagtaagctatagataaagtttagttaagtttagttttgagacagggtctcgctctgtcacccaggctggagtacagtggcacgatcatgtttcactgcggtcccaatctcccgggctcaagtgatcctcctgcctcagcctcttgagtaattgggactacaggcatgcaccaccacatccggctggggtttttttgtttttgtttttgttttgatagagatgtgatttcaccatgttgcccaggctggtctcaaactcctgggctcaagcaatcctcccgcctcagcctcccaaagtgccaaggttacaggtgtgagccaccacgcccggtcgggaactctactttttgttcaaggtttttataaagttacaactgctcttaaaaaattaagtctattaattaaaagaaaaatacacacacacaccttatgtaatcagaattgcaaaataatagacccaggaaaaatgaatggcagacacggctctaaatttaccttgtctttgcactcagagtgtctgtgtggagaaactcccagggcctctgcactaagggaaggctcaaggcagtggggaatctggccccatagcagcagctctatgtcaggtctgggtgcagtggtgccctggggcagagtggtgatcatcattgtcagccctgggccacagcctaaatgtccataacaaataaatagcaacgagccgggcgtggtggctcacgcctgtaatcccagcattttgggaggccaaggtgggcagatcacttgaggtcagaagttcaagaccagcctggccaacatggtgaaaccccgtctctactagaatacaaagattagccaggcattgtggtgggcacctgtaatcccagctactccagaggctgaggcaggagaatcacttgaaccctggagacggaagttgcagtgagctgagatcgtgccactgcactccagcctggctgacagagtgagactccacctcaaaaacaaaacaaaaaaaaaaagaaagaaaagaaacaaatagtaatgcatgcatgcattctgcagaattctccccttgctggggagataagggatccctgtgtcagctgtagtattaggtcccttagagcaggggtccccaacccccagggccatggaccagtactgattcatggcctgttaggaaccaggtcacacagcaggaggtgagtagtaggctgacaatcaaaacttcatctgtatttacagccgctcgcatcactcatattaccatgtgagctccacctcctgtcacatcagcagtggcagcattagattctctcaggagtgtgaaccctattgtgaactgtgcttgcacgggatctaggttgcatgcccctaatgagaatctcatgcctgatgatctgtcactgtctcccaccacccccagacgggactgtctagttgcaggaaaacaagctcagggctcccactgattctacatgatggtgagttgtatcattgtttcattatatattgcaatgtcataataatagaaatgaagtgcaaaataaacataatgtccttgaatcatcctgaaaccatcccccgtgcccgtgcccccgtctgtggaaaaattgtcttccacaaaaccaatccttggtgccaaaaaggctggctactgctgccttaggggctcactcatgctgtgtcttttttgaggagtctggctttgtcgcccaggctggagtgcagtggtgtgatctcagctcactgcaacctctgcctcccgggttcaagcaattctcctgcctcagcctcccgagtagctgggattacaggcacgcaccaccacactcagctaatttttgtatttttagtagagatggggtttcaccatgctggccaggctggtctcgaaatcctaacctccagtgatccgcctgcctcggcctcccaaaatgctgggattacaggcatgagccacagcacctggctcatgctgctttttggatcccgcatggcccaggaagggtagctcctgaaaatcttacctgcagtgggtgggagggtggctgcagctgcaggtagcactggctgggggagtaccagctgccgagggagaggtagctgggcaggtactgagcccccacaggcttcccgttcagtgccatcaccttggtctgagaagagaagatgcttagatcaacacccgagtgccaagagcagaaagggggtcttggggatgcttctgcttgctctgcccagaagaaacaccctctcatgctccaatatccctttggggaaccccctccccaatcctcagggagtaatagccagttgtccagcccattcttcctagcatcaagaagcaagtgtccagctgggcacagtgactcacacctgtaatcacagcacttcgggaggccgaggcaggtggatcacctgaggccaggagttcgagaccagcctggccaacatggagaaaccccgtctctactgaaaaaatacaaaaattagccaggagtagtggcgcatgcctgtaatcccagctactcaggaggctgaggcacaagaattgcttgaacccaggaggcagaggctgcagtgagctgagatcataccactgcactccaggctggcaacagagcaagactctgactcaaaaaaaaaagaagcaagcatccaagattggtcaaagggtattgggggtcaggcagagtgggtgcatacctataatctcagcattttgggaggcagaggtgtgaggatcacttgggcccaggagttcaagaccagcctgggcaatatagcaagatccagtctctacaaaaaatttgtgcctggagactcagctactaggggaggctgaagcaggaggatcacttgagtccaggagttcaaagctgcaatttagctatgatcacaccattgcactccagcctggacaacagagctagaccgtatctctgaaataattttaaaaagaagttgggccaggcgcgatggctcacgcctgtaatcccaccactttgggaggccaaggtgggcagatcacgaggtcaggagatcgagaccatcctggccaacatggtgaaaccctgtctctactaaaatacaaaaaattagccgggcatggtggccggcaactgtagtcccagctacttgggaggctgaggcaggggaatcacttgaacctgggaggcagaggttgcagtgagctggaatcacgccattgcattccagcctgggcaataagagcaaaactctgtctcaaaaaaaaaaaaaaaaaaaaaaaaaaaaagttggcctgcctctgtctctggctcctgggaagtaggtagactctaaatagggtataaacgggccacaccagaaaggccagttgtgtgattagatggctgggctttgagccacaggttatcagcccatctccagggaagggagagggcaggagattgagattagtcccatggccaatgatttaatcaatcatgcagacgaaatgaggcccccacaaaaaactttggacaccaaagctcaggtgagctttcctgcttagcaatgctcagcttgtggggattacatatcctggttctgtgcagagaacacacaaagcttccaatctgggaattgcccagacctcaccctatgcatctctctctttggttggttctaatttatgtcattttgctatggtaaagctgtaattaaaaggtggtagggtagtggaatttgcagccagtaggtgggaagcacaggtggcccggggacccctggacttgcagctggtgtcagaatttagggtagtcttgtggagagggctgtgcctaccacctgtgaagtgtggcccagctccaggtagctggtgtcagaagttactgcaatctcccacctggtaggggatgggcagggcagatctctggttcctcaaggagtctgagagatgccaggctgtggtcactctcttaaaacaggacagtgggccgggtacggtggctcacacctgtaatcctggcactttgggaggccgaggcaggtggattgcctgaggtcaggagttcaagaccagcttgaccaatatagtgaaaccccatctctactagaaatacaaaaattagctgggcgtggtggggggcgcctgtaatcccagctactcgggaggctgaggcaggataatcgcttgaacctgggaggccgaggttgcagtgagccaagattgcaccactgcactccagcttgggcgacagagcaagactctgtatcaaaaaaaaaaaacaacagaacagtggcccaggtgaccaaacagctgtgctgtgtgttgagcagcaggtccaacacaagaaagcgtgaacccatctggctgtgaatgtcaagtggcaaggcagtggcttcagtggttaaaacctttaggacatggtgcccacagaggacaaagtgaccacagtgtcctcagttcccatctacgtatttactctctgcagggccgccaggtccactgccagttcccaaagccaagggctgggacatcctctccagtccctcctgttcttgcctcccctgatgatgggacactaaggccttctggatctacttcctcaagagctccagtttggagacctctctgtcctcacctcctgtctgcctgcctgggcccgccctgaaccacccccaactaaagactctggagtgatcactgggtatcgaaaatcagatcaggccagacatggcagctcatggcctataatccctatgctttgggaggctgaggtggaaggatggcttgagtccaggagtttgagaccagcctgggcaacatagcaagaccccatctctacagaaaaatttattatttatttatttgcttgtttgtttgtttttgagatggagtctcactctgttgcctaggctggggtgcagtggcgcaatcttggctcgctgcgacttccacctcccgggttcaagcaattctcctgcctcagtctccagagtggctgagattacaggcacctgccacaacacctggctaatttttgtatttttagtagagatggggttttgccatgttggccaggctggtctcaaactcctgacctcaggtgatccatctgccttggcctcccaacgtgctgggattacaagcatgagccactgtgcccagcctctacagaaaaatttaaaaattagctgggtgaggtgctaattacgggcatgcacgtgtaatctcaggtacttgggaggctgactcaggaggatccctttagcccagcagttagaggctgcagtgagctatgatgatgccactgcactgcagcctgggcaacagagcgagaccctgtctcttaaaaaaaaaaaaaaatcagatcactctttcgcctgacactgccttccactgagcacccgtgaggtggcggaaaccaccattggctctctccccaatctctttccaaaatggctcaatgtagttgagcacttgtgagactctgattacagtataatcacggtctgcctctgaacctgcacccaggctgttccacccgcccagaagcagcctggctgacttccccatggtcaggagtccatttggagagatctccttggacaagactcctttggcataactggtccaggcacccttatctctctttgaccttccacctgatcccaggatggctgtgttgtccatcccactgtctagtggaatgtgtactcctgcagggctgggacgggctccaggcccactgatcaggtgcctgcacccagcctgggggaggccccaagtccatacctgctggctgaataacaagggtccacgggactcacccacctccagccacacgtgctgggctgacgtggggatggaggggatttcaaaccccactagtccacgctgggacacaacttcactggtgtagatgttatcctttggtgtcagctctgccttaatctggaccgtcaccccctcagctgggctgccatcggggtaggatagctccacctagaaaaggtcacccaagacacaacagagttaagacggccatgctccccaaactgatctgcagaatcaacgcaatccccactggaatcccagcaggcttctttgtagaaattgacaaactgctcctgaaattcacagggcatcgcaacgagttccaaatcgcaaaaacaatccttaaagggaacaaaaaagaaggactcacaggtccaggagtggtggcgtgtgcctgtggtcccagctactcaagaggcttccaaggcagacatggaagccggatgcagtggctcacacctataatcccatgtgaggccaggagttccagaccagcctgggtaacatagtgagacctcactacaaaaaactttaaaatttcaggtgtggtggcatgcacctatagccccaactattcaggaggctgaggtgggaggatcacttgagtctgggacttcaaggctgcagagagctatgatggtgccactgcactccagcctgagtgactgaatgagaccctgtctcttaagagaaaaaaagttttaaatgaagttgcatccctacctcacaccatatacaaaaataaactcaaatggatcacagacctaaatgtaacagctaaagctataacattcttagaagaaacataagggtagaccttcatgcccttggatttggcaaagaggtcatgaagtacaaattacatgtgctagtcattagtctgatgccataccagggtatggacagttcagtgtgacacttaaacctcacccattcagactggttggagagccagctagaatgaggcagacatagatgttttaaaaggagcacagattgtagcctctgaagaaccctaaaacagccctcagctgtgcaggtatctggtgacggagtgaaccaggattcagcccacatgatcttcattaaccactccctttttttttttttttttttttgagagacagagtcttgctctgttgcccaggctggagtgaagtggcccgatcatagctcactgctgcctctacctcctgggctcgcaatcctcctgcctcatcctcctgatagctgggaccacaggtgtacaataccatgcctggctaattttaaaaaaaaatctgtagagctggggtcttgctctattgcccaggctggtctcaaactcccagtctcaagcaatcctcccaccttggtctcccaaagtgtgagccacaaacgtctggcctatttctttttattttttgtagagactggatctcactatgttgcccaggctggtctcacacttttggcctcaagtggtcctcttgccttggcctcaagtggtcctcttgcctcggcctcccaaagcactgggactacaggcatgagccaccatgcccagcctaaccactcctttcttgaatgcagatggtaggtattttctgtcatatgtgaaacgctctttaccaaatttgtagccttaaacctcttcttcatacacattctgaccccgcacgaggtactttagtttctactcaagctggggccctcaaagccagggacacaggagatgtgtctgtgcatgggatagaggtggctccaacactggcatggagaagagaaaggaggttccaaagcagaacaagagggtcagaactcagtgttaggacagccagccagcatcactcatggacggcaaaagggaactgggtgcagacagatgcagggccagggatgtggcccactttccccttgcatgacactgggctctgttggccttgccccactcctgctgctgcaattggggtgaagatgccccaggtttgtttttgttttttgttttttgtttttttatttgagacgaagtctcactctgtctcccaggctggagtgcagtggtgtgatcttggctcactgcaacctccgcctccaggttcaagcaattatcgtgcctcagcctcctgagtcactggcattacaggtgtccaccatcatgtctggctaatttttgtattttcagtagagacagtatttcaccatgttggccaggttggtcttgaagtcctgacctcaggtcatccgcccacctgggcctcccaaagtgctgggattatagtcatgagccaccgtgcccagcctaccccagtttaacagttaaaataagaataatgactgggtgtagtggctcacatctgcaatcccagcactttgggggtctgaggtaggagatctgcttgagcccaggagttcaagaccagtctggccaacacagcaagatcccatctctacaaaaaattaaaaaattgactaggtgcggtggctcctgtttgcaatctcagcactctgggaggctgaggcaggtggatcacctgaggtcaggtgttcaagaccagcctggccaatgtggtgaaaccccgtctctactaaaaatacaaaaattagtggggtatggtggggcatgcctgtaatcccagctactctggaggctgaggcaggagaatcacttgaacccaggaggcagaggttgcaattagtcgagatcatgccactgcactccagcctgggcgacagagcgagactcttgtctcaaaataaataaataaataaaaatttaaaaataaaaaaatttgctgggcgtggtggctcatgcctgcagtcccagctacccaggatgctgaggcaggcggattgcttgaatccaggatgtcgaggctgtggtgagctatgatctcaccactgcactccagcctgggcgacagaacaaaaccctgtctctaagaagaaaacatatataaggatcatgacatctggacacctcaaaatttaccgtgcataagacttgagtggtgggtgggaggcagaggctcgttcaaaatgtcacatgggtctgcacctgtcagtctcaggaacagaaggtctacctttgcagggctctcaacttaggtcctcaggggataaaatcaacccagtgaagggccaggagtgatggctcacgcctgtaaccccagcactttgggaggccaaggcgggaagttcacttgaggccaggagttcgagaccagcctggccaacatggcgaaaccccgtctctactaaaaatacaaaaattaactgggcttggtagtatgttcctgtaatcccagctacttgggaggctgaggcaggagaatcacttgaacctgggagacggaggttgcagtgagccgagatggagccactgcactccagcctgggcgatggagtgtgactatctctaaaaaaaaaaaaaaaaaaaaagaacccattgaagaaacaggactgccttagagcagttgctttaataaatggctactcagatgtctgtccaagtggaatagagtagattgtcctttcccgtggaggaaaatgtcccctgcccctcacctggaacaccagccctctccactctccgcaaaggttatgtcaggggatccgttttcagctgagtcaccactgcagagctagtggctagtggtggtggtttcacggtggtccttgggcgggaggcagcacagtcacccccaagttaccttccccacgtaggccaggcccggcttgaactgcttcctcgtgtccttggagtaccggatgtccaccagctgcctctgcacgggggtggagtcatcgaacgcgacctgctggctcccgtccacactggtcaccatggcccagatgctgaccctgccccggaagtgctcagggacgtccgctgggatcatgtccctcacgcagatgtcgaagtcccgggagccgaggatctggagggaggaaaaacacagcccgtgctcactcagggttggagtgtctttgagggatgtccctgaaacacacacctgaggtgcaagactcttcagctgcttggagggccaggggtcacttggtggcatacccaatctatgccacgggaccatgcagagggtccctcactggatctggacaacatcccagggaagatggatgttggctccattgggcagaagaggaaagaggctgggtgcggtggctcacgcctgtaatcccagcactttgggaggctgtggcgggcgggtcacttgaggtcaggagttcgatatcagtctagccaacatggcgaaaccccgcctctagtaaaaatgtaaaaaaatagctgggcgtggtgacaggcacctgtaatcccagatacttgggaggctgaggcatgagaatcgcttgaacccaggaggcagaggttgaggtgagcctgaattgtgccactgcactccagcctgggttaagaaaaaaaaaaagaggaaagagattcccatgctgacacaatctcccacagcccaggcaacagagggggcagctgaacctgctcagcctcactctggggcaccagaactccctcattcaattcctatctcaggatcccaccctgggacttggcaaataatcctcattcagaaagagctgtggagtaaattactccgtaaatgagagaactaagtcaaagaccatcagctggtagcctcccaggagaatggctgggattctccaaggtgccagtgtcaggaatgggaaaggtaggggtttatggtttccaatccatggaagagaagcctcagagagcagagagatgggctgggtgtgatggtgcacacctgtaatcccagcactttggaaggccagcagcggcagatcacttgaggtcaggagttcaagaccagcctggccaacatggcaaaaccctgtctctactaaaaatacaaaaattatcccaacacggtggcacatgcctgtaatcacagctacatgggaggctgaggcaggagaattgcctgaacccaggaggcagaggctgcagtgatccaagatcgtgccactgcactccagcctgggagacagagagagactccatctcaataaataaattaattaaattaaattaaattaaagatatctcagacataagagaggggagcccattggagcagatgtgtctcaggtgggaaagggactgagaaggagctttgggtgggaggtggggaggagccggtgctgaaaggcttaatgtccgggcacctacaaagggatgggaatctccaggaaggtgggtgtctgttgtactgtagcccactcacaatgtaacattatgctgaaagaccaaaaaaggttacaaaactttaaacaggtgggaatataaaatagtgcagccacattgaccatttggcagttcctcaaaaggtcacacatagtgttaccctctgacctagcaattccgctcctaggaaagaacccaagagaaacaaaaatgtaggtccacagaaaaacttgcacagggatgttcatagtagcatgagacataatagccaaaaagcagaaacaacccaaatgtccaccagcggatgaagggataaacacattgtggtccatctgtaccagggaatatgatgcagccataaaaaaggaatgaagcattgatcatgctacgatgtagacaaacatcaaaaacatgatgctgagtgagagaagccagacacaaaaggacatatagcatatgattcattcacagaaatgtccagaacaggcaaatctacagagacagaaaacagatagtagttgccagagacaggaggagggaaatgaggattctctgcaaaaggacatgaaggatgtatggaaggatggtggaacaattctaaaattggataacagccatggttgcacaactctgcaactatatgaaaaccatcaagctgtggccaggcgcagtggctcacgcctgtaatcccagcactttgggaggccgaggcaggtggatcacgacgtcaggagatcgagaccatcctagctaatacagtgaaaccccgtctctactaaaaatacaaaaaaaaaaattagccgggtgttgtggtgggcacctatagtcccagctactggggaggctgaggcaggagaatggcatgaacccaggaggcggagcttgcagtgagccgagatcacgccattgcactccagcctgggcaacagagcaagactccatctccaaaaaaaaaaaaaaagaaaagaaaaccatcaagctgtacactctacatgggtgaattgtatgctatgtgaatgatatctcaataaaattgtttatgtttttattttattttagagatgggatctcactatgttgcccaggctggccttgaactcctgagctcaagagatcttcctgcctctaccttccaaatattaagagctgggactccaggcaataaaattagtgtttattagtgtttttttgttttttgtttgttttttgagatggagtctcactttgtcgcccaggccatggtggtcaggctggtctcgaattcatggcctcaagtgatccgcccgccttggcctcccaaagtgctgggattacgggtgtgagccaccatgcccagccaaattggtgtttttttaactttacttacaataacctgtgaggaaacacatcaaaatatcgatagtggtcatgtccacctattggagaacaagttatctttattttcttcctttttatattttctaaagtctctatattcagcctgcaggaattttatcatcagaaaaatccctgccatataactgttttagaaagtaaaacagcggtggctcacacttgtcatcccagcacttttgggggcaaaggcgagaggatcgcttgagcccaggagttcaagacaagcctgggcaacatagtgagatcctgtctctattcaaaaactttttaaaggcagtaaataaaataataacaataagagaaagtaaaataaaatgtgtgctggtggaggtgaacctgggggttgggtcagggggtagaaggggtccctgtttctcaccttggttgttctgaggacagggcgtcccacctcgtggctgtagtaccctacaccattaacagtcatgttgatcattaaggcaccagccacaggtttcccaaaggtatacctggaacaaaaggataaagcatgctcaatttcacagccaagatggcagggagggcccagcctcaggaaggccaggttgacatagtgtggccactagtacagtgatggatgcagctccctccacaccctgcatcctgtcctgacagccctccctgcagcctggaatcgggacagaagatgccaaggccctccgatcctctgcaccaagcctccagatggacagaaaaagagaccaagggtcagagaggaactctggaactgagaaggctaggttggtgccacctctggagcagagtagtgcagaggcatgagcgactgagaggcacctgagcctaagcgccctattaagctcgactttgaaccaaggaccgaacttctctgagcctgtttcctcacccagagaatgggactcaaactaccctctcaggggtgatagtgaaacttaaatgtctgtatgtcactcctgatgcagagggaatgctggtggatggggaacaggagcaaaatgagagagtgcaggctgggcatggtggcttatgcctgtaatcccagcactttgggaggccaaggtgggcagatcacttgaggtcaggagttcgagaccagcctggccaacatggtgaaactctgtctctactaaaaatacaaaaattagttgggtgtggtggcacatgcttgtgatcccagctactaggagaagctgaggcaggagaatcaattgagcccggtaggcagaggttgcagagagctgagactgtcactacactccagcctgggcgacagagtaagactccgtctgaaaaaaaaaaaaaaaaaaaaaaaacaaggatcaacccctctcgggtcagcacactggcgggggtgctgttggatgccagggaggcctgcagagggcggggagcagccttgggggagaggggaacatggtggggttgggagggtcacaccctggggggtagggcattctttggggaggggagacccttggggagggaagaacttagagtggaagggcaggacttgaggaaggaatacacagcgggagaggggcatgctttggagagacaggggcgtgctcataggggtgaggacaccagcatggaaacaaagacaggcagtgggtagagtgcaagagactcatgtggcagggagacaccgagtactagggagggagcggggcacagggcacccttgtgggagcagggaggccatggaagaagtgtctgcctgtaggaggagggggaagcccggttgttgggggagatggaaggggagggcagaggaggggcccagggggaggaagatgctctagggaaaggggtacactccagggagggggtgcccccaggggaggggcacgggaaaggatgatgctctagcgggtggccacatcctggggaggggaacccacaggggaggagcccagcagggagggagatactttagagggaggaggacaccccagggaggaggcgcccacaggggaggagcctggtggggagggagatactctagggggaggggcacctcctgaggagggggcgcctactggagagagtcacaggaagggagatgcactaggggaggggcacaccccagggaggagggaaccaggaagggaggggcacacccatgtgggagggagggaggcagcagaggaggggaacgaccttgagggagcagcgtgatggttggggaaggggaagggcccccccagtgtgccccaggggtccctctttctcacctggcccgcacagtgcctgtctcacaggcgtccaggtcttggatataccggggcgggtcaatcagaagctcaaacttgggcaacactgaagaaagcaagcagagaggaggggctggcttctgtccctaaggtggcctcaggagccctgacaccggtgcaaggtgtctgaggaccacagcacctggccaccaccgaggttgacactgtacccatccacaccactctgctgagcagccctggggattttgtgggctgcatctatttctcatctttgggggactaggaccccattttcctcaaggggcctcccctgtcacttttagaccacgtgcttagagtgtggcggattccagcctatcccagggtggacacgaggccaggaggctcctcctagcccctgtgtctgtgcatgggatagaggtggccctgggagccaacaaggggcatccccagggtgactgcaacagagagctgatttctccatttgcttctggactcagccctgggagtatcaagccatcttgtcaccaggggcggaggtgacaccctggagcagccggtaaaccagaaagaatcgggtcctgagagaactcttgtaggagcctaagaatcttttcgttctttcttttcttttcttttcttttctttttttttttgagacagattgtcactgtgtttcccaggttggtgtgcagtggcacgatcttggctcactgcaacctcctcctcctggttcaagcaattctcctgcctcagcctcccaagtagctgggactgcaggcacatgccaccacgcctggctaatttttgtatttttagtagagatggggtttcaccatgttggccagcctggtcttgaactcctgacctctagtgatctacccacctcagcctcccaaagtgctgggattacagacgttagctgccatgcctggccacctttttttttttctgagacagggtctcactttgtcacccaaactggagaatagtggtgcaatcacagttcactgcagccttgatctcctgggctcaagcaatcctcccgcctcagcttcccgagtagcggggactacaggcacgtgccaccatgtccagataattgttttaaagttttatacagacagggactatgttgtccaggctggtctcaaactcctggcctcaagcgatcctccagcctcagcttcccaaagtgttgggattacaggtgtgagccaccaccatgcctggcctacaatacttttttctataaaaggcaagagtccactttgggaggctgaggcggaaggattgcttgagaccaggagttctagaccagcctgggcaacatgacgaaaccctgtctctactaatacaaaaattaaccaggtgtggtggctcacacttgtagtcccagcaactcaggaggctgaggagggaggatcacttgaacttgggaagtcaaggcttcagtgagccaagatcgcaccactgcactccagcctgggtgatgggtgtgaaaccctgcctcaaaaaaaaaaaaaaagtaagagtgtaggaccatcccctgaaactatacccagccatcatgagccctcagtaaacggggactcatgtcatcctccacctcttcactgccatcttcaccagtttccttttctttttctttttttttttgagacagagtctcgccctgtcgcccaggctggagcgcagtagtgcgatcttggctcactgcaacctctgcctcccggttcaagtgatactcctgcctcagcctcccaagtagctgggaccacaggtgcgcgccaccacgcccggctaatttttgtatttttagtagacacgaggtttcgccatgttggccaggctggtctcaaactcctgacctcaagtgatccgcccacctgggcctccgaaagtgctgggattacaggcgagagcccttgcacccggccttcttcaccagtttctaaggtttctcccagatctgaaatcccaagaccctgagattctccaacttaccatacttctgaacttcaaaagacttgttgtacgcgtggccttgcatttcaacaaaaatgaaccattctcccaacacaggctggtcggacaaggggaagctcatgttggtgatgcctgtgtgaagagagagggcaagggctttttcagagagccacagacacggtgaggtacgggaagagggagccaggaccctgctccttctccttccctgagcagccccccaggagaactggagaccacagagaagctggcggggtctgtgcagagcagcaccctgtaggatcaggccagcggagcaggtttgacaccccggcgggcttcgaagggatgcaggaagggactggacccgcggttcccgggacagccttgcagccagggccaggggcaggcagtgagctggacaaacgagggaaatgagccagcccggctcattcactccatcccccgccacccgagtcatttccagcctgggcactactgacacctggggccacgtggctctctggggtggaggtgtcctgtgagctgtaggatgctgagcagcacccctggcctccacccaacagatgccagtagtaccaatgccccccacaatataacgacctaaaaaagtcccccagatactgccaatatcgcccctagggggcaaaatcacccctgggtggaaatcccagagagagagagagacagacagagagagagagagagagaaacagacaagacagacagggtctcctgccaggatagggtttctcagcctcagcactactgacatttagggccagatcattcattgtggtgtgggggcatcctgtaaactgaggggtgctgaccatcatccctggcctccactcaccaaaggtcagtagtaccaatgccctctacaatataacaacctaaaaaagtcccccagacattgccaatatcgcccctagggggcaaagtcaccccttggtggaaatcccagagcactgaggggtgctgagcatcttccctggcctccactcaccagatgccagttgcaccccttgtcctccacaaaagtcctgacaagccaaaatgtccccagacattgccatgtcccctgggggcagaatcgcctgtccgaccccccacccctccatgagaaccaccccccaactgaactagagcacgcacacactttagaacagagcactctctccccaaacatccccccagaaacaccatcagccgctgacatgggagctgtcatttgctttgcgcctgtgcctctgagccccgtccgcagctgttttcactgggagccatggaggagttggaaagggcacattgactctaggcagtgccaggggatcttccactcctgagtgtgacacgctccactcgtccccaatgatcatatggggagggccatacagggaagggacagggagagtggttcccctgggtctcacgacagaaccgaaaacccatagcggcgcccacggcttctctcaatcacattggagtcagaagatgtgatggctaaaatggctttttccccctcatattcaggcaaagtgggcctttgatggttacaggacattcggggatgtgtgtcctgagcacgtgttttgtaaggggtctgtggccaactttgccaagtgctccctgagagaggggcacagtcaccctggttgagaatcatgggtctacacacatcccaaagggttttttttttatttttttgagacagagtcttgctcttttgcccaggctggagtgcagtggcatgatctcagctcatgcaaccttcactcccgggttcaagagattcttgtgcctcagcttcctgagtagctgggactttaggcacccgccaccatgtccagctaattttgtatttttagtagagacagggtttccccatgttggccaggctggtcttgaactcctgacctcaggtgatctgcccgcctcagcctcccaaagtgctggcattacaggtgtgagccaccaagccaggcctcaaagggtttttttaaacaggaggttgacctcttccccaactctgtgctcttaagatcaagtcagcctaggcaacatcttgagaccctgtctctaccaaaaatttaaaaaattagctgggcttggtggcacgcgcctgtggtcccacctacttgggaggctgaggtgggaggatcacttgaacccaagaggtagaggctgcagtgagctatgatcacaccactgcactccagcctaggtgacagaatgagagagaacctgcctcttgagaaaaaaaaaaaaaactttttaaaaaaagatcaaatccattctcttccctggctcttgccagtgtcacccctgctctcagcactcaacatctctctcctgtcccccatctccaacctcactaccctagacatccacagcccttcccataagttgactccctgcctgggagatgcttcctggcccccttgctttgcctggctgtcccccgttccttctttgttgctgaaaaggatcctccttcaggcagccttccaggattgcctctgccaccccgggctgggatagagccccatttgccatctctgagttttgaacttctccttcctagcactcatcacaactgacattatccaggctgtttagttcatgtttgcttcccccattgggttgaaagctcaccccatggcagtatctatgtggcgcccaacaaatagctgctgatacaaagacagcaatcaagggaacgagagggagtaaagaaggcagacagggaagatggaacagaagaaaagaggctgaggccaggcacggtggctcatgcctgtaatcccagcacttttccgaggccgaggcgggcggatcacctgagtttgggagttcaagaccagcctggccaacatggtgaaaccctgtgtctactaaaaatacaaaaattagccaggcctggtggcacgtgcctgtaatcccagctacttgggaagctgaggcaggagaatggcttgaacccgggaggcggaggtggcagtgagccgacatcgtgccactgcactccagtctgggtgacaatagcaagactgtattttaaaaaaaaagaagaagaagaaaagaaaaaggagaaggaggaagaagaagaaagaagaaggaggaaggaggaagaagaagcaggaggagagggggaggaggaggaggaaagaagaaggaagatcgaagaagaaggaggaggaggagggagaataagacgaagagaaggagaagaagaaagaacaagaaagaaggaagatgaagaagaagaaaagaggctgagacccaaggcaggagacagaaggaggaagggtcaccaacagacccccgtgatcctgcctgtggctctactgttaccccatttctggacagcctgggtgtgtgcatggccatccccagactccccacaccctacctatcccctgccctctcctggggcatcacacccctcacaggcaaagcaaagtggggtatgtcaattacacagtcttcctagtcataggaaaagaaaagaaaaaagcaaagtcctttctgacttctagctggaaaagaaatatctcatgcaatggggatgataaaatctgcaacctatagcaggaagaagctgggagcaggccgggcgtggtggctcacgcctgtaatcccaccactttgggaggacaaggcgggtggatcacctgagaggtcaggagttggagaccagcctggccaaatggtgaaaccccatctctactaaaaatacaaaaataagccaggcgtggtgccatgcacctgtaatcccagctactcggtaggctgaggcaggagacgctcttgaacccgggaggcagaggttgcagtgagctgagattgtgccactgcactccagcctgggtgacagagagagactctgtctcaaaaaataaaaaacaaggtgagagcaggtgccccagtattccacaaaggtcttgagttctgagcaggagccccgcctgagtcctgggcatagagaaacgtgggcagagggtccaaatccacagggaaggtgctgtgggctgggctgaggctcccagatccaaacccatggcattgtcacctcccaggtgggtacctgccctccgctcctccttggtcccctccagctggagcagcagtgggggtacattagcggtgggccctggacagagcatattctgttttcctggaaggtttatcacatctgcagcccccaagccgcagaggaagaaacttaccgcagcagaacggctttaagtgtctccactctatcatccgagagcctcgggggtcctgttggtggtggagggggacagacacacggagtgaactcaggctagcctagcatgtgcccaatgtaaggattttcccagtcctctctcttgggcatgtcaaccatgcagcgaaggtcccaagattaatcattaaccccggggcaaaaaaaaagctctggatagagaaggatttgaaaagcagaaggggatgggctgggcctacctcctcatttagggagccgtgtacaaacctagaaatggacgtggctgggtgtggtggctcacacctgtaatcccagcagtttgggaggccaaggtgggcggatcacctgaggtcaggagtttgagaccagcctggccaacatggtgaaacccccatttccactaaaaaagatacaaaaaaaaattagctgggtgtggtgccatacgcctgtagtctcagctactcgggaggctgaggaaggagaatcgcttgaacccgggaggcagaggttgcagtgagccaagatcagcaccactgcaatccagcctgggtgatagagcgagactccatttcaaaaaaaaaaaggaaacggacagacacacacacagcccatcccagggcggacccagggaccaggatagaagaggccaggtcccagccttgtaaggcacagcggctcaacccagaaggcagacagtgagcgaagacagaccagatcttgcagaaggtgggctacccgggccccaagtccaagccgaggaaggacagaggccactcaccaggatgtaggcttccagctgtaatgaagacacagatgcagtgagcaaatcttccagcaaaccccaaaccctttcaacatgctcatgcatggcctcggtccccgggacaggcagtcgctgttatgggttaaacagtgtccccctagattacatccgttgaatcctaaccccaagtagggtctttagaaagactcattacaggtggctcatgcctgtaatcccagcactttgggaggccaaggcgggtggatcacgaggtcaggagattgagaccaccctggctaacaccgtgaaatcccgtctctacaaaaaatagaaaaaattagccgggcatggtcgtgggtgcctgtagtcccagctactcgggaggctgaggcaggagaatggcatgaacccaggaggcagagcttgcagtgagcggagattgcgccactgcactccagcctgggtgacacagcgagactccgtctcaaaaaaaaaaaaaagaaatggggaaaccaggcaggcactacttgaaccactggaccctgttaatgtccccagcaacacgacaaacccatgctgggtgcctcctgatacaaggcaccggggaggatccagtattgcttctgtggatcctgcccgagattcacagactgaacttggtcacaaggaaccaggagaccatcctaccaaggggcgttctgcaaaacaactgcctggacttgccaaaaatgtcaatgtcatggaagacacagaaaggcagtgaggaactaattcaaattaaaggagaccaagagacatgatgatcaaatgcaacaaatgacccacgatcagatcctggaccagcaaagaaacatgctataaaggttactattggaacaacatggattttatattagatattattattgtgtcaatgtcaaaattattttcctcctcttttttttttggtttttcgttttttgtagagacagggttgtgctttgctgcccgggctggagttcaagtggcacaatcacagctcattgcagcctcgaactcctgggctcaagagatcctcctgactcagcttcccaagtagctgggactactggcacatgccaccatgctcaactaatttttattattttaattttttgtcaagacagtttcgctatgttgcccagaatggtctcggactcctggccacagcgatcttcctgcctcagcctcccgaagtgctgggattacagatgtgagacactgtgcccagcctcaaaatttttaaatgtgatgatcctccttgagttgtataagagaacgtccttgctcttaaaggatacaggccaagtgttcagggccagagaggcacagtatctgtaagttattctcacattatttaccattaaaataattttgtaagtatatatacatatacagacagagagagagcgctagaaagaaagcacataaatatagccaggtgcagtggctcacacctgtaatcctagcactttaggaggctgaggcgggtgtatcacctgaggtcaggagtttgaaaccagcctggccaacatggtgaaaccccatctctactaaaaatacaaaaatcagctgggcatggtggcacacacctgtaatcccaactactcaggaggctaaggcaggagaatcgcttgaacccgggaggcagaggtcgcagtgagccaagatcgcaccactgcacttcagcttgggtgacagagcaagactccatctcaaaaaaaaaacagaaaaaaaaatcagccgggcgtggtggtgggcacctataatcccggctactcgggaggctaaggcaagagaatcacttagaacccaggaagcagaggttgtagtgagccgagatagtgccactgcactccagcattggcaatagagcgagagactcggtcttggggaaaaaaaaaaaattaagcaacagtccagggctacctaaagccctcaaaggcattccttgttgaggggcagtgggccaggcacgcccaccagccttcctctgtcacaaagaactccctggggttctccgggggacatgaaacaaccatgaaagaaaatagaaaagagaagttctggagagaaagacccgtttccgatggtggccctggccaggtagtcccaagtgggtgcactccgggcccgcggttttagaagctgatctcaccttctcgttgacaggcctcagatttggagagacggtgaagatgcttatgagcactagaagaaagaagagaggcgtgtgacacctccagaccatggccggccctccctgcatccatgctggccactcacctcggtgctggggtctgtacacaggcttgtccgtctggatgaatacagaagcgccccggccgtccacggtcaccgaggtctggttgtgaaagaggggcccctcctccgcctgccagccgcggccccacactttcagaagcgcttggccccggaggcccgtgggcacctgcaggcagaggaaggagctttgggacaagaattcaccctggaatgggccaagatactggggaaggagtttggaggcctggaacagggggaactcaccccaggagtgactgtgccccagggggacacttggcagtttctggagatgttttggggtgtcatagctttgggggtggggattgctactgtcacttgagaggggaatagagaggctgctcaacatcttacagagcacaggacacccccgcccttggcaaactgccccaaatatctttttttttggagacaaggcttactctgtcgcccaggctggagtgtagtggcactatctcagctcattgcaacctctgtctcccagctcaaatgattctcccacctcagcctcctgagtagatgggattacaggtgtgtgtcaccatgcctggctaatttttatgtttttagtagaaacggggtttcaccatgttggccaggctggtcttgaactcctgggctcaagcaatccatctgcctcagcctcccaaagtactgggattataggcgtgagccattgcacccggccatatcttttttctttctttctttctttctttctttttttttttttttcaggcagggtttatctctgttgcccaggctggagtgcagtggtgcaattatggctcactgcggccttggcctgctgggcgcaagcaatcctcccatctcagcctcccaaagagctgggactacaggcatgcaccaccaagccaggcttattttgtttatttttggtagaaacaaggtctcactctattgcccaggctggtctcaaactcctgggctcaagcgatcctcccacctcagcctcagattacagacgtgagccactgtgccaagcctgccccagctttcagccatgctgaggctgagaaacactggtctagttatggagccttctcttctgactcaacagagttgcaaagctgttttctgtcatcatcactggagagttacaagaactgtctcccttcttgccaagtgaattcacagcctgtgagcggtggaaggagacctggatcccttgatatacatatgtacatgtccagatatatctatcatgtatatgtgtctgtgtttgcctcactctaaaatcgcagcacaggctgagcgcaatggctcacacctgtaatcccagcactttggggaggctggggtgggcggatcacctgaggtcaggagttcaagaccagcctggccaacatggcaaaaccccatctctactaagtacaaaaattagccagctgtggtggtgggcacctgtaatcccagctactcgggaggctgaggcaggagaattgcttgaacccaggaggcagaggttgcattgagcccagatcgcaacattgcactccaacctgggtgacaagagtgaaactccatctccaaaaaaaataaataaacaaataatacaaataaagtcacagcacaagccaggcgcgatggctcacacctgtaatcccagcacttcgggaggccgaggtgggcagatggcttgaggccagaagttcaagaccagcccagccaacatggtgaaaccctgtctctacaaaaaatacaaaaaaaattagccaggtgtgtgtcaggcacctgtagttccagctactctggaggctgaggcacaccaatcacttgaacctgggaggcagaggttgccatgagctgagatcacaccactgaactccagcctggatgacagagcgagactccgcctcaaaaaataaaataaaataaaataaaataaaataaaaatcacaacacatatatagtgcatgactccattgatctgaattgtccagaaaaggcaatccacagagacaggaatcagatgggtggttgctaggggctgggagaagggagtggggagtgactactgatggggacagggtcttcttttgcggggataaaaatgttctggaactagatgggggggcattgcacaaccctgtcaatgtagtaaatgccacggaattatatgttttagaatggttagatggcttttttgttggtttggtttgtgtttttgccacacagatgggagaaaaaaaaaaaccacttcagtcttcaggatggagcctacactacacaattccttccttccttccttccttcactacacattccctccctccctctctccctccctctctccctcccttcctttctttcttccttccttccatccttcctacactacacattccttccctccctccctccctccatccctcccttctttctttctttctctttctctttctttcttttgtttttagagacaatatcttgctctgtcgccagactggagtccaatggtgcgatcagagctcactacagcctcaaactcctgggctcatgcgatcctcctgcctcagcctactgagaagccaggactgcaggcatgcaccaccatgcccagctaatttattttattttattttttggtagagatggggtctcactatgttgcccaggctgggctcaaactcctgggctcatgtgatcctcccgactcagcctcccaaagtgctgggattacaggtgtgagccatggcacctggccgtcctcttatttttttttaagcagatgggcagaacgccctggcatgtgagtcatgcactataaaagctcctttcatgcttaaaacaaacaaaagtaatgcctcctgtattagtctgttttcacactggtgataaagacatacccgagactgggtaatttataaagaaaaagaggtttaatggactcacagtttcacgtggctggggaggtctcacaatcatggcgaaaggtgaaaggcacgtcttacatggtggcaggcaagagagaatgagagccaagcaaaaaggggtttccccttataaaatcatcagctcttgtgagacttattcattaccatgagaacagtatgggggaaaccaccccatgattcaattatctccctctgggtccctcccacaacgtgtggaaattatgggagctacaattcaagatgagatttaggtggggacacaaccaaaccatattacctccctctatgtgaccggtatttgatgatagttaccctctcagccatccctgggcacccagcaggtggacattacctccaagcagatcacctggggagctatgtgcacccacctgttcctaaaaccacccaaatggctgggcacagtggctcacgcctgtcatcccagcactttgggaggctgaggtgggcagatcacctgaggtcaggagttcgggaccagcctggccaacatggcgaagccccgtctctactgaaaatacaaaaattagccaggtgtgatggcaggcgcctatagtcccagcgactcaggaggctgaggcagcagaatcgcttgaacccagaaggcagaggttgcagtgagctgagatggtacagctgcactccagcctaggtgacagagtgagactccatctcaaaaaataaaaaataaaaaaaatgtaaaaataaaactatccaactgtggggtgttcctcttctgaggacccctatgtcagcatctactcatgtggtccctcaaggggtggatggaccctggtgaccatcacggggaacaatctaccagattatctgactgatcatcacagttctgcactgtcatgaccattgtgtgggtgaggtcggggtgcactaggacccccgctctctgaagccacacggggtccgtcccagccctctctccagccacccacctcctgtctgctctgaacagcctcagagggacctctcctacctgccacccgcaggaccagccttctggacctgtgaggtctcttctgactgcagtttccccgtcaagaccaaccaaagcaataaacctcacccactactccaatcccaaaatcctcacctggccctgtttctggaaatatctcaacactggccagaggctgaagagggaggaaaggtcccggccacccaagagcagggcaaggatgggcaggagggagataccggaggtgctgaggaccgtatgctggagggacagggaggctggcgggcaagagactatgctgagcacataaagggggccgaccccaaacggcagcccctagagcttcacaccttcccagggaagaggatgcctcccacagggagagaaggcaagaaggacctccagccttctttccgtgtttaaagacaggctcttgctctgttgcccagactagagtgctgtggtgcgatcacgtctcactgcaacctcgatctcctggactcaagcaatcctcctaccttggcctactgagtggctgggactacaggtgcaggccaccatgcccggctaattttttattttcagtttgtagagacaggggacaggctctcaactatgttgcccaggctggtctccaactcctggcctcaagcgatcctccagtttcagcctcccaagtagctaggattacaggcaccagtcactgtgcctggccaaatgctaaggatcttaagcatctttcttgggaatctcaagtctagtcttaagagcccttggcccctctcccagaattatacaaccctttgttagtctctcttacaaattcccagcatctgtgctgtgaagagtgtcttctaacgtgtggtggccagggactgcacatcatcttaacacctgctccagggaaatggcttcctgactcataagaaagcagatctaggctgggtgcagtggctcacacctgtaatgccagcactttgggaggctgaggcaggtggatcacttgaggtcaggagtttgagaccacagtagccaacatggtgaaaccccacctctattgaaaatacaaaaattagctgggcatggtgggggcgtctgcagtcccagctactcaggaggctgaggcaggaaaatcacttgaacccaggaggcagaggttgcagtgagctgagatcgtgccactgcactccaccctgggcgacagagcaagactctgtctccaaaaagagagaaagagagagaaaaatctaatcacacaaaggaaaggcaggagagagagagaggaaggaagggaggagggaggaaaagaaatccaatcacaggaagccaggaaagggagttctagggtctttttttttttttcttttttccttatgcttctgtaggcattgaagccctagggcagggaccctcaacccctgggccacagactggtaccagtcaatggcctgttaggaatggggctacacagcaggaggtgagcagtgggtgagcaaatgaaccttcatctgtatttacagccgctccccatcactcacattactgcctaagctccgcctcccatcagatcagtggtggcattagattctcataggagtgtgaaccctattgtgaactgtgcatgggaggggtctagattgcatgctctttatgacaatctaatgcctgatgatctgttactgtctcacatcacccccaggtgggaccatctagttgaaggaaaacaagctcagggcttgcactgtttcttcagttatggtgagttatatcattatttcgttatatattacagtgtaataataatagaaataaagcacacaataaatggaatgcccttgaatcatcctgaaaccatttcttctgctccctggtccgtggaaaaaactgtcttccatgaaactggtccctggtgccaaaaaggttggggactgctgctctagggttttggttcagggtttcctgaatgtggacttctggggccacatccttctttgctgtaagggatcctgcgcattgtaagatgttgagttgcagctgtggcctccacccaccagatgccagtagcacctggcaccgcccagccccaacccagctgtgacaaccaaaaatgtctccaaactttacgaaatgtgccctgtagggcaaaagcccccttgagtgagaactgctgccttagagaaagggttctatcatcaaatgtaatggaggggccaggtgctgtggctcacgcctgtaatcccaacactttgggagggctgaggtgggcagatcaactgaggtcaggagtttgagaccagcctggccaacatgatgaaaccccatctctattaaaaatacaaaaaaattagctgggcacggtggtgcacacctgtaatcccagctactggggaggctgaggcaggagaatcacttgaacccaggaagcggaggttgcagtgagccaagattgcatcactgcactccagcctgggagaaaaagcaagactgcttaaaaaaaaaaaaaaaaagtaaggcaggaagaccactgtcctgcagcaaataggcactagtggtatacctcatacaaaaggaactatctcagcctccattctgatcaatggagatgggcgccttataatttaaaataattctcaatttagcccattcattcgtagactcctttgagcatgtggtaaaagttaaggaatagctaaccccccaaatgccgcaattccagggcttacataatatctgaaatccaaggactccagtttgaaaacccatgtcataaaattatttacatagtttggtacatataataatttaaaaataacaatattcaatgtctgagaggcagtggagaaatctgatccctaatgtactgcaggtggttccatgaacaggtactgctgtgtattccaggacacagcaagacccagtgagaggcttgggtcctgctggtaattcttcaatttggctgtttagcctaaagaaggcatccagaatgctaatatggctttacatacaaacattctggcgacttaaggattacagtatcaaaacactgaaaacagcccaggcagggtggctcatgcctgtaatctcagcactttgggaggccaaggtgggtggatcacttgaggtcaggagtttcagaccagtctggccaacatggtaaaaccccatctctactaaaaatacacacacacacacacacacacacacacacacacacacaaaattagccagtcttgatggtgcatgcctgaggtcccagctacttgggaggctggggcacgagaatcgcttgaaaccagggtcagaggttgcagtgagctgagattgtaccattgcactccagcctgggagacagagtgagacttcatctcaaaaaaaaaaaagaaaaaaaaaaccactgaaacaatctagaaaaaatctagctgggggcttagcaaactgatatttaagaggggtgcaataggatgctgcttacaatgaaatggaaattccaattacagagacttggaaacatggaagttgtttacaacagtgtgataagagggactaggaaacaccacggtgttttgttttcttttgttatgttttgttttgttttgttttttgagacggagtttcactctgttgcccaggctggagtgaagtggtgagatcttggctcactgcaacctccgtcccatgggttgaggcaattctcctgcctcagcccccgagtagctgggattacaggtgtgcgccaccatgcccagttaacttttgtatttttagtagagatggggttttgccatgttgaccaggctggtctcaaattcctgacctcaggtgatccaccctcctcggcctcccagagtgctaggattacaggcatgagccactgcgcccggccagtggtgtgtgtcctttaactgaaactatgaaaagaaaatgtatgtgcatgaacaagaatgtgtggaaaacatgaaaaagtgaaaagtatgaaaactggattatcggtggatttctccttttctaaatttcattattctctcatttttttttaaatagggcctcactctgttgcccaggctggagtgcagtggtgcgatcatagttcactgcagcctcaacctcccagtctcaagcgatcctcctacctcagcctcccaagtggttgtgagaacaggcgtgaaccaccatgcctagctaatggataatttttgtattttttttttttgtagagacaggattttaccatgttttccaggctggccttgaattcctgggctccagagatcaacccacctcagcctcgcaaagtgctgggattacagatgtgagcatggcacccagcctcattattcattttttacatctcttttttaaaaatgatttttctcacaacacatgcaatttctcttattccatcccaattcaattcttttttttttttcttttctttttttttttttttttggtgagacggagatttactcttgttgcccaggctggagtgcaatggtgcaatctcggctcacagcatcctccgcctcccaggttcaagcgattctcctgcctcagcctcccgagtagctgggattacaggcatgtgccaccacgcctggctaattttgtatttttagtagagatgcggtttcaccatgttgcccaggctgatctcgaactcctgacctcaggtgatccacccacctcggccttccaaagtgctgggattacatgtgtgagccaccacgcctggcccaattcaattctttatttccaaggtcaggtttatgattttaaaaatcaacggcttaccttgagtttgattgtccctttatctaaaaatgaaaataaaatgaaaaaagttaaatcaagagctgtgttgccctgcctccctgagctgcagcctcacaaaccacaaactttcttaacccaaaggggtttcatgtggacaaacacaccctgggtcatgctggcctggactgggccaggctaggactggcagaagccagaggtttcctccaagctggcacaagctgaaggccagagggaatggacaaagctgagctattcagggcaaagctggcctgcctaagtacttgatttacttcacccctggctcctgtccaaactaagctgtgaggggagtaatgggaaaacaccaggggagaggaacaaggagaagggtggagagaaagaagaggggactgaggtccccagtggacctgactgttctcccatcacctctctctgctacccacactaaatcatttgtgctactgtactaggtttctggcctccaggactcaattaggtatctattatttttgcctcccagcaaccattatcccatttcctgctaacagatcctcaatttccttggacaagctatctgcccagcacacaacgcacgtggctcccaagctctccatccaccttcctgggactctgagccaatctgcataggccttccccctggtcacagtgattggttcagggctgagcacatgacccaaaatgaaccaatcagcataggccttcccctctggtcatagtgattggctcagggttgagcacatgaaccaagataggccaatcagagggaatcctgggactttatccagccatcttgggagactggtgcttcccctgatcttaaggagagacctggttgcatcaagaggtagggggagaagctggccagcaataccagtggactttctttctaggtatgagagaccacaaactgttgcagaagccaactgggttgggtttcagttggctagccacccaagtcaggagtgcctggttcttctaggactagaagggcttctagaaggttctagaagcttccacatttccaccttctctggccacacctccctaagagacaagtgctgcttcactggccttggagcccctggccttctctgtgtctcctgtggctacatcattctcggcatgaggaatgagtctacctcccctgggagattacagctttctgagccagggatctgcattcactatcttgaccaggaggctgaggctgttgctgtctgcatttgaccaaggagtgaaggggagagactggctgagggcctgagctgcacttagtaacaggcctgtgagcccaggtctgagtctaatggttcaggtgtgctggaaacccaacaaaaggtcagaggggggtcatgtgatctccttcaggtcccctgtcccacctctggtcaaagctgacacaggtgggtgcccgtgctctgcccagatctgcacccacagaaccagggctgctgaggacccatgagctgagctgcccatcctgggctttactctctctccatctgtagaatgaggagaatgcaacctgtcttccctccctccctcccatgcccctggggatttagggcagaagggaagcaaagcaacacccacactgccccagccctgaaggccagcaagtggctccactttgcaaaagaaggggaagtcctggtctggcacccaagggacctacccaggatggctccctggctctgcaccaccggctcaccctgggccaccagctgagcctggaccgtgacttcccttggagagttaaagatggtcacgctgatgacttcctccacgcccgcgcgaaaaacagagggagctgcaatcaagtaacccctgcaggaaaggagatccgaggtgaagttctcaccccagacccctggtctcgctgccaccacagctaggtcagggctctcctcgcagcagactcctgccttttgctgaccacacctggctggcattgatgctctaggagtctgtgcccccccatcagttcttgagtccatggattggctctttcacctgtgaagtccccatgctgggtaagaatctggcctcactggatttttcagcattgcacaacccctcttactctctctattccggcctccagcctgttgactcagctacttccttctgccccaggacctttttttttttttcttttcctggagacagagtgttgctctgtcccccaggctggagtgcagtggcatgatctcggctcactacaacctccacctcccgggttcaagggattctcgtgccttagcctcccaagtagctgggattataggtgcctgccaccacggccggctaatttttgtctttttagtagaggcagggttttgccatgttggccaggatgatctcaaactcctgacctcaaatgatccaccctcctcagcctcccaaagttctgggattagaggtgtgatccaccacgcctggcccttctggcccaggacctttgcacatgtcatgcccactgtctgaaatactctcctccacaagccaggtaaccggcaggatcccacttcatcctcacggtgcaccccgtcccccaccaccgtgagaagtgctgacatcagccccatttagaaagtcagaaaggaaaccccagagaagtcaagtcaccagccgcaacagtgacagaccaggattctaactcaggcggtcagactccaaaacctgataaaaagaagcaaagggcttctttgcaacattcattttaagaacaaaccctgaaaacaaaccatagggcctcaaacaaaaagagctctgaaaacaatggaatcaaagcaggcctctctttcctaaaatcttctgattgactatgaagtcacctctggaagggaggcattacccccagtttccccatgggaagttgatgcttcagaagaataggaacatgcaccagatcacacagccaggcagaagagggcactgaggtgcccttaggggacctgacctgagggcccaggtcctccccacctgagctcctgtctcccagtatctgcagccttccatggaaaattacaaaggccctgtaacctcatgaaatgcttacagtgtccccacaatcaccaagagcattatagcaaaggcaccacaattgcaaccatgtagaatgatggaaatcagaagaaaagagggtaaagggggaaactggaccatgcaatgagattaggagacattttcatttcaatattttctttttttatttttatttatttatttatttatttttaattgagactgagtcttgctctgttgcccaggctggagtgcagtggtgtgatctcagctcactgtaccctccacctcccaggttcaagggattcttctgcctcagcctccagagtagctgggactacaggcgtgcaccaccacacccagctaatttttgtatttttggtagagactgggttccaccatgttggccaggctggtcttgacctcctgacctcaagtgatctgcgcaccttggcctcccaaagtgctgggattacaggcccactgcacctggcctcaatagtgtctctagaacaacccaacatccacatgcaaaaagatgaattgagaacattacctcacaccatgcaattagattaactcaaagttaatcttagtaacagatctaaattgaagaagtaaaacttgtagaaacactagaagaaaacaaaggagaaagtcattgcatgcttagattaggcaaagatttcttgagtaagataccaaaaataagatccataaaataactcactgataaaccaaacttcatgaaaacatcattaccaattttgcatctcaaaagacgcagtgggtttgtgttgtttcatgcacacgaacaatgggtttgggttgtttactgcagccctggccacagtgtgcactgaccctgtgatcatagtgtgctacatctgccttgaataattaccagagttcagtcccctgggatcacacatgtgctgtccaactctaggaccaactggagtttgcaagaccctgggtatgtgctgtgtattacataactccagcactgaccaggacatgcaattaccctgtccaggtgtcctgtccagctccagcactggaatgtggcatcctttaaaaggggaatactctttctgtctggctcccagctgatccctagagtttagacgggcctcacatatagtacatggtgagtgtagaagagagagtaaggaatacgtgttcattttgcttggtcacctttgaaactcctgacaatacgggttcaagtcttcatccaactgcccagagaaactgacatcaccaaattaagtttccctgccattcagaagttgcagctgtttccagctgttgggatgcttgccagccattcactgtcacacctgacccacccctagcatctgggccaacactgcttctcatcctgctggtctcagaaggtcccagattggggaaagggatgtctgggtcagtgtagacagaattgctcttacaactgcaaactgtgctgctttctgggatcagagattcctcacacaaaaatctctcaggtgacagaagtgggcatccagagctattcctaagacgagatcctttgggctgggtgaaccatgcccctggcttagaggccagctaatctggaatcccaggtcggtcatttggggacatctcttccccagtgtgtctctcagcacagggattccatgtcacttaacagatggtaagatcacagggtgactttagtcagaggaaaacgccctggagaactgtttaaaactctctaacgggccaggcacggtgactcacgcctctaatcccagcactttgggaggcggaggtgggtggatcacctgaggtcaggagttccagaacagcctggctaacatggagaaaccccatctctattaaaaatacaaaaaattagccgggtgtggtggcacacgcctgtaatcccagctactcaggaggctgaggcaggagagtcatttgaacctgggaggcggaggttgcagtaagccaagatcgtgccattgcactccagcctgggcaacaagagtaaaactccatctcaaaacaaaaacaaaaacaaaccccaaaaacaacaaacaacaaacaaaaacctctgtataaggcagggtctctcattggagccaaggtctgtcatgtggggccgcgtcattccttgcagtggaagctgacctgcacatcgaaagctgtttaccagcattcctggcctgcacccacttaatgccaacaccaaatgcctctccctatttgtgacaaccaaaaatacctccagacatttcccagcggcctcagggagacaaaaatcccccccagggctgagaaccactattctaagggatgccagctttgaaagaagcattaggatgaaaatttgtagggttccgatttcacgaagcctaggagagggaagtctggatgctcagagcgcagtagactgtcttgcttttaaaactgtgaccagcaaggaccaactactcactgcaaataacgacacccacctagtctcactgcttaccagttttctggaaactcctaaacaagggctgcttgaacaagccgccttctaaacgcccagctggactaaaaggctggtcttgtgcagaccagggcagcccccctgaacccgcagccctgcagagctcacccgaacttgccaggtttagaaatattctctgtgaagccaacttagcagtactccccagcagttagttaattcaccttctccccgctgtcaacccaccagaagcctgcaagcaaacctctagaaaaatgtagaagcaaaacaaacacttcctcctccctcaccacgcccacccacgggaaagtgccccttcgcactctcctcccacttctcagccaagacgctcctcttaccttcataccttggacaactggaaatcgccacccatgatgacagcccgggtcacacgaagggggcgaggtggggcggggggagctgacctcagcacctttagcttttgggagtccctgtacctccacagagccacttcggaaactttagggcgccccctcctcaagacgattcgggaacaagaggccaggtccagcccagcgcggaggctgtgtggccttgggcaggtcgctgcaacactctgagccagtacccgcgacccccaccccagaaggcgaccgacctcctctgtcgccggaggatactcacggggcctgaggctgcgcggcgcgcacgccgtcccgcgccgacagcagcaggagcaggagcgggagcaacggccagagcagggcgccgctcatttttcggctcctggggggcgccgcgcctggggagggggccgggccagggctgggccagggccagggtccgagcgcggccgtcctcgcgccgccgccgggggccctttgttcgcagcccccgcgcagtgcgcccggcgccatgcgccccgctccgcgcccggccaagctggggcagccccgggccagccccctccccggacccgcctcgtctccgggaccgccccgctcgccccgctcgccccgctcctgggcgcaccctcccgggacgcctgctccgcccatctccggaccccgacccgccccgatcccttccggggatcgtcccctcacttactcaccggacccacccgggccctgcccgattccttccgaacccgcctcctcaccccctacccggattcgcccccggatgcccccctccccaccagccccgcctcggacccgaccccccaccgcccccactctccctctcctctccacccagcgtccactcggaacctgtcccttccctggcctctccctccctccctccccagccagccccttatggccccctccccgggcccgcccctcaccaggggcccctgggtctggacgccgcctgcaaccccgatcccacaggcgccgccgtgccctaagccctggcctgtatctagtgcccagtgcagtgcgtacagcccaaggagcagaggaccctttggggaaacagtctagccaggggtcgaacctcccagactcacatctgccccaggtccctatctgtgctctctgctcccctctcccccacccccactgtccacaaatcccttgggcccgtcccctctctcgctgggcctcagagtccccctttccccttcatacagcaggggtggatgggcaccccctttctctccaagagcagggtgtcccctcctgcccctccccgtgtggccacctcagtgatggtcctgctgtcctaggtcccactggcaggcggcacatcctataccatgtccaagtcctggaccccctccttccagtgtggaacccccttcccccagctaccaactgcccttcttctaaaattccagtgctgaccacaccccctcctgcccggaatcctcggggctccctgtttattttacattttatttttatgttttgagaccagagttttgctctgttgcccaggcaggaatttagtggtgcagtcacagctcactgcagcttcagactcctggagagtagctgggactacaggtgcaagcccgcacccagctaatttttatatatttttttttagaaacggagtcgcactgtgttgcccaggctggtcttgagcactgggctcaaatgatcctccctcctcagcctcccaaagtgctgggattacaggtgtgagccaccacatccagccagggcttcccgtttattgagaccaaatctaaactctggctttgatggcagagacctcagcctagttcctccaacaccctgttcttactccactgcctgcttctgcctaatctctgtcttcctctacctgcctcctttgccagtccaactcctgatccttccaggaaactcaagggaagcttctcttgccccctccctgcccctagggatgtgggtcctctgggggcttctcagccctgtcaacagcctttggacccaacactgatcacccaggcagcaccaagccctgggctgggcaatgaggaccctgggacatacaggacctgctgccactgagcacacaacccagaggggacgtaactgatgatggtgtgttggtgtgtgtgtgtgcgtgcacgcgcgcaggggccggagtagattgagtagccgtctctcctgcctggagaagaggaggagctgcctgcctccaagctcagaccaggccaaccccaaacaggctgctaaactcacatggaggtgcaaaaatctagcaccaagaagcagcatctgatctcaccctcatcatcgaagtttgccccatgccacccctccgggcccctccaggccaactctgactcctacctaagccaacctccactcctcagcctccaggccagcctttgagccctccgcctcccccttgaccattgggctctggccacatttgctcctgagatacatcagacccccacccaccaccaccatcttgggccaaggtgccagctgtcccctctgcctgggatgcacttccccgtggcatcacaagaccggctgctctcctccaccttcagggttagcccggaggtgccttccctgcctgcctggtttgtaaggtctaaaatgtcagtgctgccttggcatggttgagccacacaggaccacgatgtcctgaccgaccgttcagctactcttgccaaatatgccccctgcctggcaagagaagctgctctccacctggctgtctcaccaagcaaccagaccagctgcaccccacccatcagccacagacttcacttccctagctgctgagaagttattgaaacaagccatgcccagtcgtggtggctcatgcctgtaatcccagtactttgggaggccgaggcaggtggatcacctgaggccaggagttcaagaccagcctggccaacatggtgaaacctcatctctactaaaaatacaaaaattagccaggtgtggtggtgcacacctgtaatcccagctactcgggaggctgaggcaggtgaatcacttgaacccaggaggtggagtttgcagtgagccgagattgcgccactgcactccagcctgggtgacagagtgagactccgtctcaaaaaaaaaaaaaaaaaaaaagaaagaaagaaaccaatcacatcctcccaggagaaccaggggctgcctcaccctcttattactacaaagcctgcttcccacagcccctgcttgttcattgtgctcccgagtgcaacccctgtgtggcctcacacagtgtacagggtcctcctcccgtcattgtgtgagaataggtgagcactaaactgtagatctcacccacccaatgtcacatgttgtatgtttggccatctcatactcttttttttttttttttgagacggagtcttgctctgtcgcccaggctggagtgcagtggtgcgatcttggctcgctgcaagctccgcatcccgagttaacacttttctcctgcctcagcctcccaagtagctgggactacaggcacccgccaccacgcccggataattttttgtatttttagtagagacggggcttcaccatgttagccaggatagtcttgatctcctgacctcgtgatccgccctcctgggcctcccaaagtgctgggattacaggagtgagccaccgcgcccggcctattttttttttttttaacggagtctcactctgtcacacaggctggagtgcaatggcgtgatctcagctcactgcaacctatgcctcccgggttcaagcgattctcctgcctcagcctcccaagtagctgggactataggcgcctgccaccatgcctggctaatttttgtatttttagtagagacagggtttcaccatgttgcccaggctgttctcgaactcctgacctcatgtgatccacctgccttagcctcccaaagtcctgggattacaggcatgagccactgtgccgggcccatctcatactatttagagcagcagtccccaacctttttggcacaagggacaggtttcatggaagacattttttccatggacaaggggcaaggtgatgggagggacagtgatggttttgggatgatcaagtgcgtgacatttattgtgcactttatttctattattgttacattgtaatataatgaaataatgatacaactcaccatcgcgtagaatcagtggaagccctgagctgttgttttcctgcagccagagatcctacctgggggtgatgggagacagtggcagattatcaggcattagattctcataaggagcatgcaacatagatccctcgcatgcacagtttgtaatagggtttgggcttctctgagaatctaatgctgccgctgatctgacaggaggtggagctcgggcgataatgtgagcgatggggagaggctgtaaatacagatgaagctttgcttactcatccaatatcagaccagtgtcagtctgtggcccaggggttggggacccttgatttagatcatgggtgaataggagccaatgaggacactagcatggcccggtcatccagtttgactgcatggtacacaaaacacagagcatggtcttattattccatacacatctgcttcctgtctgtcttctttgggatgtgagccccccgtttgctgctggccgcagcccctggctcaaagtgggcacacctcacacagattactgcctcatcagcacacgggagaaggctcgctgcttagaagagtcagttgatactattccatgaattatacaagcctgagttaacaaagccatgactaaaaactaaattataccgatttgcaatgaaacacattatacaggttgagtagccaaaatgcattatcggccgggtgcagtggctcacgcctgtaatcccagcactttggaaggccaaggtgggtgaatcacttgaggtcaggagttcaagaccagcctgactaacatggtgaaaccccatctctacaaaatacaaaaattagctgggtgtcatggcaggcacctgtaatcccagctgcttgggaggctgaggcatgagaatcacttgaacccggaaggtgaaggttgcagtgagccaagaatgggccactgcactccagcttgggcaacagagccagaccctgtctcaaaaagaaaaaaatgcctaatctaaaatgcactttccaaaacggtcagtgcaagaaatgttccagatttttaatttttcagatttggggatatttgcattatacttactggtagagtatcgtgtgtgtgtgtgtgtgtgtgtgtgtgtgtgtgtgtgtgtgtgtgtgtgtagtctggctctgttgcctgggctggagtgcaatggtgcgatcttgactcactgcaaccttcacctcctgggttcaagcaatcctcccacctcagcctcccaagtagctgggactacaggcacatgccaccacatcaagctaatttttgtatttttatagagacagggtttcaccgtgttgcccagctggtgtcaaacttctgagctgaagtgatccacctgcctcagcctctcaaagtgctgggattacaggcatgagccatcatgcccagagtatctttaatctgaaaatctgaaatctgaaatgttttggtgagtgtttcctttgagcgtcatgttggcgctgaaaatttttaaattttggagcatttgtggaatttggattttcagattagagatgctcaacgtgtattaaaaatatggctgggcgaggtggctcaagcctgtaatcccagcacttggggaggccaaagagggcagatcacttgagaccaggagttcgagaccagtctgaccaagatagtgaaaccccatctctcctaaaaatacaagaaattagccaggggtggtggtgcatgcctgtaatctcaactacttgggaagttgaggcaagggaatcacttgaacccaggaggcagaagttgcagtgaactgagatcatgccactgcactccagtccgaacgacagagtgagactgtctcaaataaaataaataaataaataaatagcaaaggcgctgaaagtactcaaaactcatcacttcgtcttcattttactacattttacaattctctgtactcttgaggttatgcatggtgaaaatactccataataacacagatctcttcctaactctatgtttagtcacttcacgccagtaggttgaaattacccatgggcggagtacagtcacttccactttatcacttgttttgaaagcacaaatgtgttccgacatgatggatgcattaggaatgatttgagcataaaatcaaatattgtgttcacttatgtaagatttttgtctgcaagaaacattgggtatgaatgcagaaaactgcacctggctgaccccagccacgtaggaatacacaaaaaccacacctgcaccctctccagcatctctgtgctccctcagtgccttgctgtgtgccaggagccacatctgtccctgtctgaggttacaatatcccgcctgatttcagatgatctcctcccagaccttcacagtaactcacaggctgccacctccccatgcccaggtccacaaatgagccttcagtctttccaaggctgatactgtatttgtgtattttttttcttttcttttcttttcttttttttttttttttttgagatgggttctcactctcttgtccaagctggagtgtaacggcacaatcagggctcactgctgcttcaacctcctgggctcaagtgatcctcccgcctcagcctcccgagtagctgagaccacaggcatgtaccaccatgcctggctaatttttttgtatttttagtagagacagggttttgccatctcactcaggctagtctccaacttctggactcaagcgacccacccgccttggcctcccaaagtgctgggattatacaggcgtgaggcatcgcgcccggccatattcttgaaattcttaaccatttgacatttgtacaatgtcactaccatttttagtaggtgcctattttttttttaggtgtcattggtgacatttggatggttgtgccctgacccgttttcccatgagccctgtggtttgattgtgtgaatttgcagcgtgaggtcatttttaggaatggccctgttgtgtgagggcggaactggctgcattagccccatggtaagtggttgtcaaacatctccaaacatgcctaggatgagcagctttgcagtttggatgggggacgaggaagaccgcaaagactgtcctgttgtcaatgggcgtttttctttttttttcttttctttttttttttttttttgagatggagtctcaccctgttgcccaagctggagtgcagtggcgcgatctcggctcactgccaacctctgccacccgggttcaagtgattctcgtgcctcagcctcccgagtagctgggattacaggcacatgccaccacgcccagctaatccagctaatttttttgtttttttttagtagagatggggttccaccatgttggccaggctgttcttgaactcctgacctcgagtgatctgcccatctcggcctcccaaagtgctgggattacaggcatgagccactgcgcctggcccaatgggcgtttttctcccacttagccagcatgtgcctgtgcctgccaggtgcccaggagattggatgtcaggactgaagacagacagacagcctgatggcctgcagtgatctgggtcttctagcacagtgcccctgacagggttcctagggccagagggagatcaggccatgcctgtccaggacatttcgtataaatggaatcatacactatgtgtgcttttgtgtctgccttctctcacccagcatcattttttgtttgtttgtttttttaagatggagtcttgctccattgcccaggttggagtgcagtggcgcaatctcggctcactgcaacctccgtctcccaggttcaagcgattcttctgcctcagcctcccaagtagctgggactacaggcatacaccgccatgtccagctaattttttgtatttttagtagagagagggtttcactgtgttgcccaggctggtcttgaactcctgatctcaggtgatccactcacctcagcctcccaaagtgctgggattacacgcatgagcctctgcgcccagccaaaatatgcaatgacacctaccaggagtgaggcaggaatgattttcttaataacatgtttattattcttttctcccccttgctttattgtcagaatacgatatataatacatagaacatacaaaatatgcgttaattgatcgtttatgttatctgttgacttctggtcaacagtaggctattaatagttaagttttgggggagtcaaaagttatgcacagattttcaactgccaggaggctcagcaccccaaccccattgttcttcagggccaactatacatctgtttagaaaaacaaaaatgtacactgaagcacaaaaattgggccaggcacagtggctcacacctataatctcagcaccttgggaggtcgaagtgggaggatcacttgaggtcaggagttcaagaccagcctgggtattatagtgagacttcatctctacaaaaaattaaaaaatttggccagatgcggtggctcacccttgcaatcctagcactttgggaggccaagacaggcagatcacttgaggtcaggagttcgagatcagcctggccaacttggcgaaatcccgtctctaccaaaaatacaaaaattacccgggttggtggcaggagcctgtaatcccagctacttgggaggctgaggcaggagaatctcttgaacctaggaggcggggttgcagtgagtcaagatcgcgccactgcactccagcctgggtgagagactccatctcgaaaaaaaagaaaaagaaaagaaaaattagctgtgtgtggtggctgagtggcctccaaaggtggcttttagggggacatctgggatctgccccagcaagtcccagctattcaagaggctgaggcaggaggattgcttgagcctaggatttgaagctgcagtgagctatgattgcaccactacactccagcctggatgacagagcaagactctgtcttaaaaaaaaaaaaaaaaaaaaagccggcgccgtggctcacacctgtaatcccagcactttgggaggccgaggcgggtggatcttctgaggtcgggagttcgagaccagcctgaccaacatggagaaaccccgtctctactgaaaatacaaaattagccgggcatggtggcggcgcatacctataatcccagctactcaggaaggctgaggcaggagaatcgcttggacctgggaggcagaggttgcgatgagccgagatcgcgccactgcactccagcctgggcaacaagagcaaaactcggtctcagaaaaagaaaaaaaaaggatggggcaggataacaggatgcaggcctgggactttccatggaggaagaggcctcagaaaggtctatgtctgggacaaggcgacctgaagtgcccttgggcttaacctcttggactcagccctctctggggtttggagatgccagctgccccaaaaaccgctccgagcacaagcaatgtgccacacagccctgtggcaggaaggagctcgtgcccgctccaagtagcaccaagcgtggaggaaggcaaaggagactcgggctgccacaggccctctctgggtgtggggaccagagatcaagccaggttcccattcttgccctgtgaatcctgcactgtgtcctcagggcggggagtgtacgcaggccatcgggggacagcacagggcagttggtccccagccggtggggaccagtgtgtaggctctagggtcagcctcagggtggccttggggatgtgcagctccttggagaagatgaactcacagctggtccaagctctgacgtcacttccgggaggaagcttcagcctcataactccagaaccacttccctaaaatccgagtttgccgagtttttgcttcaaccatcttgagtagctttgtcctgcctggaccctgagtctgagcaaagataatgccctgtgatcatccagccccagacagccttgaggcaccaccgcagccccactgttcctggggcatgccctagatgtcccctgaaggctgccctcggaggtcagtcagtgatccgccctctgcaccaagagggcttcttcccatctttctggctccttctggcagcttcaccatggtgaagccccttctggggtgctccttcagctgggtgactgtgcctccaaatgcatgcttgtgaagtctgcacctgcccagctcacctggggtctgtctgcacctgcccagatcacctggggagccatgtctctgtccaccttacctggaggctgtctctacctgagctcctcatctgggggctgtccacaactgcccacctcacgcgggagctgttcacacctgcccacctcacctggggtctgtccatacttgtccatctcacctgggggctgtccatacctgcccacctcacctggtagctgtgtccatacctgcccacctcacctgggggctgttcatacctgcccatctcacctggcggctgtccacacttacccatctcacctggggactgggtccctacctgcccatcttacctgggggctggccacacccgcccacctcacctagggtccatgtacccacccacctcacctagggactgtctacacccgcccacctcacctagggacggtctacacccacccacctcacctagggactacacccacccacctcacctaggtccatgcacccacccacctcacctggagggccatgtctctacccacctcatttggaggctgtctacaccagtccctgttgcctgggggctatgtacacctccccatcccacctgaggactatgcacccatccacctcacctaggatttacccacacccacctgggggccatgtccccacccacctcacctgggagctaactacactcgctcacctcactgtgtccctacagggtgagcacaggcggagggcagggagtggggcaggagtgtcagggagcagggcaggggtgtgtgcgtctgtccgggaagaagggtggagatgctgcctgcagccctttttacctgcacctgagccctcagtgcagctctgcatcagacactcccagggcccggggtctggtgaccggcaccatctcctgtctcttaggtggcatctctgcccaaccattccttcttagaggctcctgtgacatgagagcaggaatggggcctgggacagcactggaataagaaaaccgaggccctggccaggtgcggtggctcacacctgtaatcccagcactttgagaggccgaggagggaggatcacttgaggtcgggaattcaagaccagcctggccaacatggtgaaaccctgtctctactaaaaatacaaacattagctgggcgtgattgtgggtgcctgtaatcccagctgctcaggaggctgaggcatgagaatcacttgaacccaagaggtggaggttgcagtgagccgagactgtgccactgcactccagcctgggcgacagagcgagactcggtcaaaaaaaaaaaaaaaagaaaaagaaaaagaaagaaagaaagaaagaatggaggggcagggtgggagagagagagaaaggaaaagaaacgaaaagaataagaaaagaaaagaaaagaaaagaaaagaaaagaaaacaaaactgaggcccagacacgattcagccccagtaggcaccctggcaagctctgccttctgggcaagcaggctggaaataaaagcaccacagtgaacaccctggcccgcctcggctccgccagcagcatctgtcctggagaagacgccagctcagtaccagaaatgttccggacacaacctggaccgggcagaagctgaggagccaccaggctgccagcagttccaagcacatgctaggggctgcggagggggctcgccaccctctaactccctgggggtggcctcgtccagccccgcaggaggcctctgtctattggagctaagcctggagacggccactccggccaatggcctgtccaacccaggtgtagacagcccctgagtgaggcaagcaggcacatggccccccaggtgagctgagtgggtacatggcctgccgaggtgaggtaggcaggtataggtaacccccaaatgaagtagacaacccccaagatgaagtgaacaggtgtagacagcccctggtagacaggggcatggtcctccagataagacgggtaggtgcatggcctcctagacgacataggtggtagacagcccccaggtgagggggacaggcataaatagcccccaagtgaagtggacaggcatagaaaacccccaggtgaggtggacatgtgtagaaatcccccaggtgaggcggacaggcgtagaaatcccccaggtgagttggacaggcgtggaaatctcccaggtgaggtggacaggtgtagaaagcccacaggtgaggtggacagacgtagaaagcccacaggtgaggtgggcaggcctagaaagcccccaggtgaggcagacaggtgtagaaatcccccaggtgagatggacagatgtagaaatcccccaggtgagatggacagatgtagaaatcccccaggtgagatggacagatgtagaaatcccccaggtaagatggacagacgtagaaagcccaaagctgaggtggacaggtgtagaaatcccccagctgaggctgacaggtgtagaaatcctacaggtgaggcagacatgtgtagaaatcccccaggtgaggaggacagttgtagaaatcccccaagtgaggtggacaggcatagaaatcccccaggtgaggtagacagggacatagcccccaggtgaggtgaccacttccttcccttccttcctcccatcaccaaatgtccacagacaccgcccccacccaggccagcataccaggtgctggagactggcccagctctcagtggctcccaatattttggcagatcagttccaaacaggtgcattctagaaactctgacagcagggctcaccccacagggcaccggtgaggatgggaacccaggaatgtaaggccagccctgagcctggacctagtcaatgttccataaacggcagcctagggacactgggaccaggcagcccaggagtgggagggaggagttggctcctgctggatcatggtggtggggcagggtgggggtcggggggatgttgcaggaggagacgtttgtttcatcacttgttcatgcaaaccttctgaggcaccctcgccattcagctccccaggcccccatccagcccacagcctctgccatccctgccctaccctgggacttggactctcattgccctgtgagcccggctggctcattcccgcttcccagccagcagcccctcacctgccagggctccaataagctttggctctggagggcacccacactgcccctcctccagccatctttttttgggagtataattggggtataatttacataccacaaagttgacccagtgaaagtgtctggttcaatagatttactattgattaagatctatttaatcaatagattttagtatacttacagttgtgcaactgtcatcacttctatttcattctagaacatttcatcccccaaaaggagaccccgtccccattagcagtcactccccattccctctcccaaagcccctggcagccactcattgcttcctgtctctatggatttgcctgttgtgggcatttcatatcaatggaatctcacactatgtggtgtttcgtgactagcttctttcactcagcattgtgattttgggggttttgttttgttttgtttttcagacaggatctcactgtcgcccaggctggagtgcagtggaatgatcatagctcactgcaggcttcatctcctgggctcaagcgatcctcctgcctcagcctcccaagtagctgggactacatacaggtgagcaccaccacactcagctttttttttttttttttttttttttttgagacggagtcttgctctgtcgcccaggctggagtgcagtggcacaatcttagctcactgcaagctccgcctcccaagttcacaccattctcctgcctctgcctcccaagtagctgggactacaggtgcccaccaccacgcctggctaattttgtttttgtatttttagtagagactgggtttcaccgtgttagccaggatggtcttgatctcctgcccttgtgatctgcacatctcggcctcccaaagtgctgggattacaggcgtgagccaccgcacctggcccacccagctaatttttatattttttgtaaagcagggtctagctatgttgcccaggctggcctcaaactccagggctcaagcgatcctccctcctgagcctccccaagtaccaggattacaggcatgagccactgcacccagccttatttggtttttgtatgggtctgctttatttttctggtattggtcttaagttctccaatttatctcctcccgttcccccttcatttctttccaatcaagctgtttctctccctccccatcactcccctgaaactgatttcatcaatgttaccaatgatagacaatttccttaattgaatgttctatttgtgtgcttgttttatttgatttacaagaagcattggacacagctctctttttctttcttttcttttcttttctttctttgagacggaatctccctctctttcccaggctgaagtgcagtggtgcaatcttgactcactacaacctctgcctcccaggtccaagcgattctcatgcctcagcctcctgagtagatgggatcacaggcatgcaccaccacaccggttaatttttgtattttactggagacagagtttcaccatgttggccaggctggtcttgaactcctggcctcaagtgatccacctgcctcggcctcccaaagtgctgggattacaggtgtgagccaccatgcccagcctcttttttttttttttttttgaggcagagtcagtggcgcaatctcggctcactgcaagctccgcctcccgggttcacgccattctcctgcctcaccctcctgagtagctgggactacagccgcccgccaccacacccggctaatttttgttgtattttttaagtagagatggggtttcaccgtgttagccaggatggtctccatctcctgacctcgtgatccacccacctcggcctcctaaagtgctgggattataggcgtgaaccaccgtgcccggccccatgcccagcctctttaacaaacatcttaattggctttatgattgcaggtgtactttggttcagcaactccaagggcccacataacctgcctcagaactccgcatatctgccttcttccatcctgtggtccctcacaccagatgtggtgggtggcagtcctaacagcctcctgtccctgaaacctgccggtacctctcactgcaactccgggaggctggtacaaatgctcctatcccaggtcagccctggacccggaggccagagacaaaaagaccccagctgggcttccagctccccaggggaaagtttggtgccgaaaggaaaatatttacgtggtttgtaagttgagctatccccctgcagaagtgatcaaaaggacagtaaagatggaaagtccgtgttgtcgtgatgcaggctgtgccaagccacgcagcaggcgtgatcctggaggactcttcagggagctgatggacgtgacctgccgacccttttgttttctgaaatcaccaaacatctgctgagtgagctgcttcctggacccttttgggaatgttcccaggcttggttgttgaggaaacacagtgcaggggtggagtgggttctggaggctgcgacttggccagagccgcctgtgtgcgtggagcggggtgtggggggtgtttggatcacctccaggggtccttttcagcaggaacacacgagtcatttttaatcaatcaaaaagaggaaaagagacaaaatgcatttaatgaacactcccataccatgctgtgatgaaatgcttttaaaagtcacaagaggccgggtgcggtggctcacgcctggaaccccagcactgtgggaggctgaggtgggaggatcactttgaggacaggagttcgagaccagcctgggcaacatagtgagacctcatctctatgaaaaataaaaattaaaaaattagctggccatggtggtttgcacctgtagtcccagctacttgggaggctaaggtgggaggatagcttgagcctaggagtttgaggctgcaccaagctatgatcgtaccactgcactctagcctgggtgacagagtgagaccctgtcgaacaagaaagagagagagagagacaaagggagggacggaaggaaaggaaaaaagaaagctaggcaccaggcttctgttgtgaattaaatgtttctatttctcactcactgcaactcagaccgccacgcctcacgcagatttatcagaaagcatctgcaggccaggcatggtggctcacgcctgtaatccaacactttgggaggctgaggcgggagaatcacctgaattcaggagttctagaccagcctggccaacatggcaaaaccttgtctctactaaaaatacaaaaaattagccaggcatggtagtgggcgcctgtaatcctagctactcaggaggctgaggcaggagaatcgcttgaacctgggaggcagaagttgcagtgagccaaggttacaccattgcactccagcctgggcaacaagagcaaaaactctgtctcgaaaaaaaaaaaaaaggcatctgcaaaggttatagggagattcctggggggaagaaagcagcctgcttgaggaatcttttgctcacaggtaaaaaagcaagaaggccaggcagtggctcacacctgtaatcccaatgctttgggaagctgagtcaggaggatcacttgaggccaagagtttgagaccactgtgaacaatagagggagacccaatcactaaaaaatatttttaaaattagctgagtgtggtggtgcacacctgtagtccccgctactcaggaagctgaaacaggaggatcgcttcagcccaggagttcaaggctgaagtaagctaggattgcaccattgcactctggcctgagcaacagagtgagaccctgtctcaaaattaatcaaaaatggaaaaataaaagccaaaggaaaaccaaatgggtctttcacacaaatgtgaaccagaaccttccacatcagcacagagaggaggaaaaagaaccacagaggatgaggagagaagagtgctggcccgggtcccttgtgctaggaaccagctggatgccaggacacatcaggcacagccaaatcccacatgggtctgcagcaggggcacccgggatgattatgaggtactcctagggagagctcatagtcccagccaatgctcctaattgcctggggtcagtaggtcgctgagctaatcctcctgagcacatcgggggtctctgccatcactgagcggggcttccagaactccctgcaacccaatcaagtccaattagccaaaaaggcaggaatgtgggctgggaccccagcagggcttagaggtctcggcaggagaccagggtggcccagggatgtctcacttgtggggaacaagccccagaccccagccttgtccagggcagggagggaggaaacccccaggctcgggtcagtggggtctgtctgttcagtggggctttcagctgtgggatccggggacatcagtgttggtgggtaatttgatgttctgctcatagatgcatgatgatttaaaagccacatttcagtaagtcaggcagaggaggacaaatattgcttgattgcacagggaatagccaaattcctagagacagacagtagaagtgagactcccaggagctggggtagaggactggagactggtttaagggcctggagtgataaaaactttggggtgtagatatggtgatggttgcacacattgagaatgcatttaatgtcactgaattgtaccttccaagtggttaacacgatcattatcatgtagagttggggtttttgttgttgttgttgttgtttgagacagagtctcactctgtcccccaggctggagcgcagtggcatgatctcagctcactgcaacctccgcctcccaggttcaagtgattctcctgcctcagcctcctgagtagctgggactacaggtgcacgccaccacacccggctagtttttgtattttcagtagagacagggtttcaccatgttggcctggctggtctcgaactcctgacctcaggtgatccacccgcctcggcctcccaaagtgctgggattacaggcatgagccactgcgcctggcccatgtagagtttactacaatgtcaaataaagactttaagtttgaaattagcatttaaccatttaaggaaattggttcatgaaatgtgtagcttgatttattatttgcgtggcagtgtttaaatattcgggaaaatgggcagagcgtggtggtttacacctgtaattcccagcacagggactgtctagggggactgaccctaccaggccaggtgatggttagagggctgagctgaggggcaccagcagggggttcagactcacacccaccccaggatgatgttgatgcagtccccacccagggtctcagatgtgggaacacgcccctcctttaagtgctacctgccactattgggagtctgtgtaagactaacactccattctttaaaaaggtaagcacatggctgggcacggtggcctacgccggtaatcccaacactttgggaggctgaggcgggcgaatcacttgaggtcaggagttcgagaccagcctgaccaatgtggtgaaaccctgtctctaccaaaaatacaaaaattagctgggtgtggtggcacgtgcctgtaatcccagctactcaggaggctgaggcaggagaactgcttgaactgaggaggcgggagttgcagtgagccaagatcgtgccatcgcactccagcctaggtgacagattgagactccatctcaaaaaaaaaaaaaaaaagaaaaaaaaagaaatcctcccaccttagcctcccccaaaaatttttaatattcaatttattaagcatttccatctaggaagtacatttccccaaatatttaaacattgtcatgccactaataaatccaactatacattaatgaaccaatttccttaaatggttaaatgctgattgcaaacttagtcaaagtctttttcttgccattgtagtaaaatatacatgatattgatcatgttaaccacttggaaggtacaattcactgacattaaatgcattcccaatgtgtgcaatcatcaccactatctacatcccgaattttttttttatcactccagcccttgaaacagtccccagtcctctaccccagcccctgggagtctcgcttctactgtctgtctctaggaatttggctattccctgtggctcccataagtgcaatcaagcaatatttgtcctcctctgcctgactgaaatgtggcttttaaatcatcacatgtctatgagcagaacatcaaattaaccaccaaggccggtgtccctggatctggatcccacagcccaaagccccgctgaacagacagaccccactgacctgagcctgggggtcccctccctccctgccctggatggggctggggcctggggtctgtttcccacaaatgagacagttcctgggccaccccagcctccctgccgagaagccccccacctgctggggtcccagcccacattcctgcctttttggttaattggacttgattgggttccagggagttctggaagtccccctcagtgatggcagagacccctgatgtgcttgggaggattagctcagcgacccactgaccccaggcaattacgagcattggctgggactctgagctctccctaggaggaccccataatcatcctggggtgcccctcctgcagatccatgtgggatttggctgtgcctggtgtgtcctggcatccagctggttcccagcaccagggaccaggaccagcactcctctcttcttgtcctctgtggttctttttcctcctctctgtgctgatgtggaaggttctggttcacatctgtgtgaaaaatagtgttagttttcctttggctgctaaccttacctaattacctctctaataatgaccttaactccaaatacagtcacattctgaaggactgtgttataaccttcacgtatgaattttggggagacacagttcagcccatactcttccccacttacagaggagatgatggaggctcagagaggggaagtcatttacccaggtcgcacagcaaaagggagtaggacaaacatcgaacacttaccgggtgccaggctcaatttcaaggctgtgtttgcctcacttgttcattttgccaatgtctattgtgccagatgcaaactgaagtgaaatacactgatgggactgggcatggtggctcacgcctgtaatcccagcactttgggaggcagaggcaggcggatcacttgaggtcaggagttcgagaccagcctggccaacatggtgaaactccgtctctactaaaaaatacaaaaattagctgggtgtggtggcacacacctgtagtcccagctactcgggaggctgaggcaggagaattgctcgaacccgggaggtggaggttgcagtgagctgagatcacaccatcataccactgcactccagcctgggtgacagagtgagactccatctcaaaaacaaacaaactgggtctcactctgtcgcccagactggagcgcagtggtgcaaacgtggctcactgcagcctcgacttcctgggctcaagcgatcctctcaccttagcttcccaaagtgctgggattacaggtgagagccactgtgcccagccttatccttcctttctatattgcccgtggttgcttttgtgcaccaaggtcaatccaaaaaataattgagtcagtgagacacagaccatctggctttacttccttgtagtcacaactctggggattctaagtctgaccatcctagccccatggccagggatgtcaggagatgatggtggtcattttgagcagtaggttcccttgcaagccatgggaggacacaggctgtgtccaggacacatcccctggaggcgtgggtgtggagaccatgagccgaattcattcattatctaaaatcaaactcaattctcatgaagtagggacgtcagccttacagagtcgggcatgtgccgcccatttccacctgtgggtggaatccaccactcctgttgactctcagcggtgcccggcttagatgatagattctagggtctctgctgttggaggtcaagactgtgatgtaatgaagtatttttttcaatgtgtgtcctgtggcagtgcccaattcagaaaacatagagcaggattttagttccaaatgagtcaagttttatatgttaagacatcgcttgttaatcttgcacataacatctatcatattcatatgctgcctagtcttgggtttttgtttttttttaaatctgagtctcactccgtcacccaggctggagtggcagtggtgtgatcttggctcactacaatctctgcttcctgtgatcaagtgattctcctgcctcagcctccagagtagctggcactacaggcacgtgtcaccacgcccagctaatttttctatttttagtagacagagggtttcaccatgttggtcaggctgttctcaaactccaaacctcaaatgatctgcccgccttggcctctcaaagtgctgggattacaggcatgagccaccgtgcctggcccaaagacatcctcttttatctgctcatgtggatttaatgatatccccttggggtataataaaaacttctttggtctttgtccacagttcctggcacgtaactcctaaatccctagaatggacattcattcataggatgaacgaaggtgttaagatgagacagcactatgggccaggcacggtggctcgcaacactttaggaggctgaggtaggcaggtcagttgaggccaggagttggaaagcagcctggccaatatggtgaaaccccatctctcctaaaaatacaaaaattagttgggtgcagtggtgcacacctgtagtcccagctacttgggaggctgaggcaggagaattgctcgaacccaggaggcagcagaggttgcggtgagccgagatcatgtcactgcactccaggctgggcgacagagcaagattctgtctcaaaattaaaaaaaaaaaaacaaacagcactatggaagcgttggctgaactgaagcaactgcgtggggtccctcaatattaaagggctccagacaagtctgctgtatttgccccagtttgcagaaattttaaaagctgaaggcagacactacaacatgaaacccaacctggactcactggggacaaccaggcagattcgtcgcactccagcccagaagacagagcaagccctgtctaaaaccaaacaaagacaaaccaggcaacaaaacccacacctccagcaatacgaattggaaatgtgacctggggatcagtaagttcccaaagcccacaccgcgtggggtggaagctggagagctggttggaggaaaatgttctgggccaaagtcccagtggagcacagatggggtttatggcaagagcctgagcatctcccagtgacaactaccgagactggaactgaaatatgtcccctccagtcgaggtgcgggatgccgggacccagtggtggacgtcctggagggcgggacccagggttccctggtggaggtgtggaaggacgagaccctgcagtctctcaagctgccagcgagatggggacccagagacctcccgaagctgccagcaaggcagggacccagcagtttctcaaggctgcctgggacccagttgccagattacgaaggcatctcaggccctggagccagagccagtcgggttaaagtggaagctccctacttcagccccagaagctggggccaggggaaggatgatgtggattgttcttgttttaccccttctgttgaatgtttacagacacaaacttgagttccaataaagaattgcatttccctaaaaaagtaaataaagtatgtccactcgagggacaattcttaacttgctgtcccaaaaccacccttgtgactgaaggacatgaaatcatcttgaaagtgggatactgggcatgtcgtggaggcccggaatttcaggaccagtcatccagaagaacttgagaaaacacaggtcttccaactggccccttcatagaaaatggaggcttcaattgcaaaacaggtttacttttttatcaaacaagattatcacataaaaaatagctacagtgctacggtagtatataaagtgctcaagtatcctgaatgtaaccatgagtcatgacaagtccctccctgaacgagagagagagggcgggacttctgcctggctgcttgaagaaaaatcttcgcttgggctgatgaacgtggcctgagcgggggctgacgaggcacccgggttgtcgtcctcagacaggggcgtgttcttgggtgctcccccagattctctgcaggcactgtcttgattgaaataccaccggctggggggcgccatgccctgggtctcttcccagacttcctggtttgccaaggctgcctctttgcttgcctctgcggagagttccagcacctgggcaaagctcctgttgaggatgggagaaagaataacggctttcaccctctgaggtgaagcgcatgtgtgtggtgaacggagggctgccacacggggaggcggattttcacatgccctacgtgctcagtgggaaagggccagcaaataagatccgtctgaaaagactcaatcagggaaaccccccaagaacagcaccagacatgaaaggaaagattcatccaagaaatgttcatggagctcagtgctgtgctgctgctgtggtgggagtatctgtcccctccaaaactcccattaaaaattaatcccctggccaggtaaagtgggattgaagtgctgtaatcccagaactttgggaggccgaggcagacagatggcttgaggccaggagttcgagaccagcctgggcaacatggcaaaaccacgtctatacaaaaatttttttaaaaatactgggcgctgtggctcacacctgtaattccagcactttgggaggctgaggcgggcagatcgcctgaggtcaggagttcaagaccagcttggccaacatggtgaaagcccatctctattaaaaatacaaaaattagccgggcgtggtggaacgcacctgtaatcccagctactggggaggctgaggcaggagaatcgcttgaacccaggagacagggtctatagtgagccgaggatcgcgccactggcactccaacctgggcgacaaagtgagactccgtctcaaaaaaaaaaaaattagctgggtgcagtggtgcacgcctgtagtcccagctacttgggagactggggtgggatgatcgcttgagcctcggaggcagaggttgcagtgaaccgagatcgcgccactgcactccagcctaagcaatgaaatgaaatcctgtctcaataataataataatccccaatgtggcagcagcgagaggtggggcctttaagaggtaactgggttcatgaacattctgccgttcatggatgaatgagttatcctgggagtgggactgtggctttataaccctttgatgtctcctgaattgatccatggccacccacaggagaaagaaatgccacagtgggtggctggctgttttgcataagtccttttccaatattttaagcaactcaggaaaaagatttagcattgtaaaaaagagaaaagatactctactggaagaggtggagaaaagcgcgtggttagaaatctcctgggggaggttaaaaaaaaaagcggggggagatcttgatgggttttgggggtctggacgcacaaggatatgtgctctgtgcaagccactgcacagtcctttaagatctgggccatttctatcaatcagaagttcaaaaaacatcctcctgggaccttaccctggaaggcattgaaaacaccaacagggctgatgtgagggcgcctgtgctgctgggttactctgaggatgtgaatgataggtgacaccctttctcttccagctgcttgagaacttccatagattttttttttttttttttttttcctgagacagggtctcactctactgctcaggttgtaatgcagtggcacgaccacagctcattacagccttgacctccccaggctcagatgattctcccacctctgcttcctgagtagctgagaccacaggcatgcaccagtgtgcctggctaatttttgtgttttttaaatagagaggcccggcatggtggctcacgcttgtaatcccagcactttggggggctgaggtgggcagatcacttgaggtcaggagttcaagaccagcctgaccaacaaggtgaaacactgtctctactaaaaatacaaaattagccgggcgtggtggtgtgcacctgtaatcccagttagttcggaggctgaggcaggagaattgcttgaacccaggaggtggaggttgcagtgagccaaaatcatgacattgcacttaagcctgagcaactctgtctcaaaataaataaataaataaatagaaacaaggtctcaccatgttgcccaggctggtcttgaactcttggcctaaagtgattctcccacctcggcctcccaaagtgctgggatgacaggcgtgagccactgcgcctggcccttccatggatttttctgagctcttttgttctctcttccccctgctctgcttgagtcttatactctgtgaatctaggacacgtcttatagcatatttgatcctcacttcacctagagtccccattagctcaaaaatgactgagaagtaggctagaaaagggaaattagctgggcatggtggcgcacacctgcagtcccagctactgaagaggctgaggtgggatcacttgagcccagcaatttgaggttgcagtgagctgagatctgccactgcactccagcctgggcgacagagtgagaacctgtctcaaaaaaaaaagaaagggaaggcaaggcgggtgcttttggatggagattttgttatccacaatacagatgacaatgacacctgctggccattcttgtatcatgcagcgtctgggaaaagagcagctcgctcaggggactgaacctcctctgaactcctagaggaactcggcaccaccccaacagtgcagccaccaacagccctgagcaaacagggtgccacctctttcttaaagcattttccgaggtaccttcggagctcaaggtcctttttcgccgtcacgtccttgagttcgctcagtaagtccagcacctgcacattttcttccgaatcaccaacatcaagttctcccaggaggcgctgagtggtcaccagttcatgctgcagggcgtctggaggggaagagggatggtgggcgatggatggcaaggtgccccacgcaaggcacacacaagtggagcggccgacagacttctgtcatgatgctcggctatcgcgctggaaccgtggagagcgcacagggaagaagcagaagccaaggaagacattcgtcccttatccatcccgtgctctgagattgtgggacaggcacatccatctatccaggagggcattggaccagaactgaaatgtcactctggtgtcctcaacagaaaccaatgcaaatgtgaaaagggctgtgctgtgccagggagaatgcctgaggcctccaagccagaccatgagcaactgaaaaacagtccttgttgcctgcaccactgagcagaaggatgcctgcaactgcgggacctgtgtcacctgcactaggacaacacgcctctctaccctgacatacatcacatcaaggccagtcgtacatgagagtcacattttgggagccttttaagtgccgtatcagccagcctcttctccctccggctgtggaccgaattatgccctccccaatacgtacgtttcactccaatcctccactcctagtgaacatgaccttaaccagaaacagggttttgtggatgggggggagttaagatgggtggggcctaatccagtgacttgtgtcctcatcggatgcgggaaatttctttttttcttttttttttttttttgagacagagtcttgctctgtcacccaggctggagtgcagtggcacaatattggctcactgcaacgtccactttccgggttcaagcgattctcctgcctcaggatcctgagtagctgggattaccggcacctgccaccacacctggctattttttttgtatttttagtagagacagggtttcaccgtcttggccaggatggtattgaactactgacctcgtgatccacccgcctcagcctcccaaagtgctggcataacaaacatgagccaccgtgctgagcctgatgcaggaaatttcaataacgagacagccagggaggaggccacgtgaggacgggcagagaatggagggacacggccatgagccaaggaacgccaagggccaccagcagccaccagcaggtgggggagacacaggatgagctcacctgacagcccctggagggagccaatcccatcaacgccttgatttcagacttctggctgaaatcaagactcccagaactgggagggaatatctttctgttgttgcaaaccacccattctgtggccgcttggtatggcagccccggaaaactcaacacgatccctaggccgttcccaggaactacctaaggaactgagcagagactgagtgttttctaagagttacagatgtggaggtgaccgcagtcataaaatcagaaacccggccgggcagggggctcacacctattcaggaacccagtgctttgggaggccaaggtaggagatcacttgagcccagcagttctagatcagcctgggcaacatagccacacctcgtctctacaaaaaaaaatataataattagccaggtgcgccaggagcagtggctcatgcctgtaatcccagcactttgggagggcaaggcgggcagatcacctgaggtcgggagtttaagaccagcctgaccaacatggagaaaccctgtctctactaaaaatacaacattagccgggcatagtggtgcatgcctgtaatcctagctactcgggaggctgaggcaggagaatcgcttgaacccaggaggtggaggttgcagagagccaggattgcaccattgcactccagcctgggcaacaagagtgaaactccgtttcaaaaataaattagccaggtgcagtggtggatgcctgaagcactagggaggctactactcaggaagctgaggtgggaggatctgagtagagcctgagaagttgaaggctgcagtgagctataattgcactactgtactccaggctgggtgactacgctagaagattccacctccgcagaaaaaaaagaacaatggcagggcatggtgactcatgtctataatcccagcactttgggaggccaaggtgggaggactgcttgaactcaagagttcaagtccagccttggcaacatagcgaaaccccgtctctacagaaaaaaaaaaaaaaaaaaaaaaaaaaaaaatatatatatatatatatatatatatatatatatatatatatatatataagccaggtgtggtggtgcccacgtgtactcctagctactcaggaggctgaggtgggaggatcacttaaacccaggaagcagaggttgcagtgagctgagattgtgccactgcactccagcctgggcgacacagcaagatgctgtctcaaaaaaaaaaaaaaaaaaaaaaagaaccaaactccagggtagccaaaaacttgctctgtgggaagatacctgttctgaagagaatttaaggtgcaacgcggcagtttttcacacttgccaaagtcttcaagttagggattaggtgggaaccctatgcctgaaagggacctcactgctctgctgagggggaaagccggggtggggctggtggtcttgtcaccccccaaccactacggcatatttgttgggagcaggactcaggagactacaggtcgtccccgcaaaatgcctttcggcaggacagatcactgtgaatcccactgcccaaggttcaaatcccagtgtggttacttactcagggcgagacccttggaggaaccacagcctggccagccctccccatcctctgccttagttggggaagagggcacttgcggtgatgacatcaggcccacaggaagcacccacacacgctcctcgccccgcctgctgcacacgcactgggacgccccgtttcctacctaagagctgctgcccatctccctccaggtggatggacctcacgggcagctcgtgcctggtagtgtccagggccgtggcgaatgtcctgtattgctccttgaagcgtgtggccactgcctcgaaggggctgagcatctcgatctgtaagcagaagggataatcaggggagaccctggagtcccctctctggaaacttaacagaagcttaacggcttgtgcagggttaagatacagcgctgttcttcaccaccccccagggaatcagagctcaggaagtttccgagggtgtggtgagctcttcccaagagagccaagtggatggcaaggcggcccaggccccttactgagaacatgtgtctgccagcggttctaggcttgggccctcagctgagcccacctgctttagagtactgcgcctaaacgcctgccttccacaaggccatccccggcatggcccactcccaccccaaacatgctgtctgggtcttcatgggggtttgaaatgatatacgattgacccttgagcaacacgggagtttggggcatcaacccctgtgcagtcaaaaatctgtatctaacttttgacttcccccaaatttactgatagctactgctgactgaaaccttactgatagtaaacattcaataaacatgtaaatagattagcatctatatacacacacacatacacacacacacagacacacatacagacacacacacacacacatacacatatatattttttagatggaatcttgctctgtctcccaggctggagtgcagcggcgcagtctcggctcactgcaacctctgcctcccgggttccagcaattcttgcgcctcagtctcccaagtagctgggttacaggcacgcatcaccatgcccagctaattttttgtatttttagtagagacggggtttcaccatgttggccaggctggtctcaaactcctgacctcaagtaatccgcccacctcagcctcccaaagtgctgggatcacaggcgtgagccactgcacatacatattttttatagacagatcttactgtgttgcccaaggtggagtgctgtggagtgatcacagttcactgcagcctccacctcccagggtcaagcaaacctcttgcctcagcttcccaagtagctgggactataggcatatgccaccacacttggctaatttttaatttttatagaaattggccggatgcagtggctcacacctataatcccagcactttcagaggctaaggagggcggatcacttgaggtccagagttcgagaccagcctggccaacatggcaaaaccctgtctgtactaaaaatacaaaatttagctgggcgtggtggtgcatgcctgtagtcccagctactcaggaagctcaggtatgagagttgcctgaacctgggaggcggacgttgcagtgagctgagacagcaccactgcactacagcctgggtgacagagcaagacgcccatctcaaaaaaaaaaaaaatttttttgtagagattgggtgtcactatgttgcccatgctgggacaagtatgtatgcactcatgacatgcctaactttttcttaattttttcagtatttctaggctataaggttcatctatgagtttcttcaaattgtcacaaatctctaaaactttttccaatatacttattgaaaaaaatctgcatgtaagtggaacctcacacttcaaattcgtgttgtttgagggtcaactgggtttgtctctttttcttccattttgagctccctaaagtcagagaccttgtactcaagcccagggtctagctgcacgggtgctcacatgaaaattttggatgttaggggttgagctgtatccccccaaattcatacctgatgatccaactcccagtaccttggaatgtgcccttatttgaaaagagggactttatcagggtcatcaagttaacatgaggtgataggggggttgtaggggggatgctaatccaacacgactggtgtcttgtggggaaagggggacacagacacacacagcagggaggacatgtgaacacagagaagacaaccattcacaggccaaagacagggccaggagagattctccctcgcagccctcagacagggccaaccaccaacacctcaatctcggactttcagcttcctgaaccgtaagagaatgaattccagttgttttgcccacccaggttgtgggactctgtcccagcaaccacaggaaactcacccactgggtggggggtccgcccctgccaatcagccctttctgggttccaggggtttgttcctgtccttctcccacatggacactgctgaccacacagcattaggagtgatgtgcctctcaccagtaccctgaccctgcaggggagtcccagagcacgtcatcctgttgctgctcacgatcatcaggcgctcaggaagtctctgcacaagtgcatagaaggtgcacacctcccttattcattcacactttactttgtaacctcattctctaaaagtgtcatcatagaccaacaccaggaccagagcaagtgtggcattaaaagcccaacacagttagaagccagtgagcaatgataccctagcacgaatgctaccgaaacagtggagatgggacagattcacagggaacactcactggtcacagagtgtcacttacaactgacctgggcatccaggacatctgccagctcccgcttcctctgagagaggagaagcctgcgcttcagctcgtgggcctttttctgtagcttctccttctccttacacattattaataaattcttttctgcccttctttcaaactcagcaagattgttctccatctgttaaatgtgaaagaaaagctcaagcaggtggggactccctccccgtgaatggaggccacccttccatccatggcatacgtgaacaagaaactgttttcacctttacggatagtagcgtcagcagtagtgtctgagactccatcatttccattgcttcagataaatccttaagaaaagaaaaagaccctctcaattcctgatgaagtggtataaatccagctcttttcccagcagggggagaactctggcttgtgtggattttctgtattcagtttgatattcggtagttctctactgtagtgggtctattgcttctattttcttttatttggttttctgcggcgctgagatgaaagagggaggtccacaaccttccttcccctggcacctggcaggtggagagacagcagcagctgggtagtcaaggacaagctgagaatacccaccaatttggtgctgcaccaggaccagaatgccgtctccccacctgctggtcccccaaccaccagtcttgtcctcaccccagtgagaccacagcctagccgtcctcccaccaagggacagggcctggcattgtgcctttcccagcacagcatgggcacagagaagtcccctgtctcattttttacatggctccatattggtatccactactgaatgtgtacttggggaaatgtaaactctacaaatgatctaagaacatctgtagtcttgatttttgtcctaaagggcatgggtgtcttttatgttcttggatccgtgggcactcagcatctggttcagagtggactctaaatcagatctatgcaacccatctgtggctgccctcttctttcagacacttaccgggctctttttccgaggggcagaaaatgatgttgactcaggtttctttgatattgtttttgctaactgtggcgtctttttgacgatgcttttgtctaagataaagcacagcatttttaatggcaagtagcgtatatagactggtccctggttgccattttttttctaatgatgggtttattgggatgtaaccccatcataaattgaggagtatatggacttataacagtccagttaaagttgttcaactttgcaaggggcaaaaggcaagtttaataccctttaccaaggtattaagtatatttttgatgtacaatattttcaacttacaatgggtttgttggatgtgaccccactgtaggccaattgtactttggaagcccactgagacctactgcaacccccagtgagtgacagaaggggtgaaacaaatgatttaccattaatagcagagagatccaggtcaggtggagctgtgccatgcccttccagcaacgtggactgcaggtcaccctttccgaccccactgctatctgctgttaagaaaagaatccccgaaagtcagcacagtcaagagacactctccattcaagccaggaaacgcaggccgtgtttttgaacaataccacttgcttctaaaagcccaatttcgtccaaggtggaaaggctaaaaaaaaaaaaaaaaaaaaaacctgtggaaattcccagccatcaccttgactctatttttaaagtaccactagaagacagagacattctgtataaccaaagagacgcaaataggcctttctgctagttcacaagatgctacaggtgggatacgatgccatattcccattctaccctctactctctttccaccttttttgtttttgagacggagtttcactcttgtcacccaggtgacaatggtgcaatctcggctcactgcaacctccacctcccgggttcaagtgattctcctgcctcagcctcccaagtagctgggattacaggcactcgccaccatgctcagctaatttctgtattttagtagagatgaggtttcaccatgttggccaggctggtctcaaactcctggcttcaggtgatctatccacctcggcctcccaaagtgttgggattacaggcatgagccaccgcactcagccaagtaatctttccatcttttttctgcagcttctggactgttcatcctccctgggagttcccttcatcttttaacgtatattctaaactgtaaaattaagccttacactgtctaagatgggcactagcatacagcatgctaccactacacaagagcccaggagtgctgcagatgccaacagatggcacgtacggtatgttgtgttaggaactaagcatgagactatttcatgaacaactatgcagctgaggaaatgaatgacctggaaatgaaaagaggaaggtcactgcaatgtgtagggtacaatataacaacgatttgtgttgaaattcttaaaaaaaatctggaaagatcagcaaaaatctattgagagcacatgccctcagggcacagactgggagcctggggtgaggaggtggaaattttctttttttttttttttgagacagggtcttgctctgtcacccaggctggagtgcagtggcacaatctaggcttactgcaacctctgcctcccaggctcaagcaatcctcccacttcagcctcctgggtaactgagaatacaggcaagtgtcaccatgcccagataattttttatttttttatttttagtagagacagggtttcaccatgttgccaggtaggtctggaactcctgggctcaagggatctaccggcttcatccttccaaagtgccgggattacaggcgtgagccaccacacccagctagaggtggtaactttttattgttattgcttttgccctggaatattttatcatcagcatgtatagcatttgcactaaaaaaattaattttctacaaagccatacaatggaactcaaacaagcagtcctttgaaatcattatggtgtggtttaaattaaggtttcttagccatggcattgcgagcacatggggctggatccttccttgcggtggtgggggtgtcctgtgcattcaggatgttaagtggcctccctggcctccacccaccagacgccagtagaaccccttcccccagatatgacaaccaaacacatctccagacactgcctaagcgttccctgggggtcagaatcgcccttgagtaagaactggttttaaggtgtggcaggcccagtctgatcccctggccacaccagcattcccagcttcatgcatggccttcaacccaattagatggggaaagactagcaggctggctctagtgtgcctgcttctcaaccacgcctgggaagggcatagcgcgaattctcacaaacatctacaccaggagtggcaaattgtagctcataggccaaatccagcccgcttcctttgcttgtaaatagttttattggcacacagctatacctgttcctctatgtctggtctggggttgtttttaatgttacaaacagcagagctgagtcttcttgttgatgttgttgagacggtgtctcactcggttgcccaggctggcatgcaatggagcaatctcggctcactgcaacctccgcctcccaggttcaagcgattcgcctgcctcagccctgcaccctcaccccaagtagctgggattataggcgtgtgccatcatggccagctaatttttgtatttttagtagaaatggggtttcactatgttggccaggttggtctcgaactcccgacctcaggatgagtcctcacagcctctctaagagtcttgctctcagagcaccagtgggaaaacagtcacatagacaagaaactgatgtcacaaagcagtaccatgatggcaatgtggcttttctctggggccacacagggaagaaatgatctcccctttgctccgcatccccactcacctccccacatccccccagtctgtccttatgctccaactctctctgctcactgcttctgacccttcccagaaaggaaagaaggaactttaacttagcacccatggagacaaaatttactgccgcgctcatcactgcccgaggaccatggctgtttcgcacctttgcttttctggagcaggctggatttccttccaccttcagacatcttccctcgggtctgtgacccatctcctgcaggagcctgttatgggaacacatgacactcagaggacaagacatcctcccttcacaacaacgggccctgatgcggtctgcactgtgtttcgtaactgctcttactttgaggcaggggagacatttaaagaggtttgaaatcttacctcatatacacaggacaaacaaattttgtcaaaatgtagatgctcacttgcagagaacataggaaactaccaaaatgtttgctggtgattattgacatggtagattacaggtgactgatttttttctagacacatttaagtatttgctagttttccagagagaacatataactttggtcatcaggagaaacaaagtttttacacatatgttgtcaaaaaatatttttttaaagaaacacatggagcactggccttctaataaccaaaagcaaaacaaaaatcttataaagagcaatggccaggtgcagtggctcccgcctgtggtcccagctactcaggaggctgagttgggaggatcgctcgggtccaggggtttgaggctgcagtgagccatcacaccactgcaccccatcctgggagacagagcaagaccagagcaacgacatgacgacgcacagacaccactctcattcaatatcacagtggaggtcctcagataagaagtaaaaggcaaacaggttgaaaaggaaaagtaaaactctgttcttacaaacgtaatttttcatgtaggaaatccccgaacatcttcaaaactgctattaaaattagtaagtttaacaagagttttctttcaattttgtgtgtgaacttgactggatatggggtgccccagactgaacatttttgggtgtgtctgtgagggtgtttactaatgagatcagcatttgaattggtggatgcaataaactgccctccccagtgtgtatgggcaccatccaatcccttgagggcctgaatacaacaaaacagtggaaggaggagaaattcataccttttgcttcctgcttgcctggttgagctgagacatcttaccccatctcctgacctgtcctcaaactgggacttacacctttggctcccctggtctcagcccttcagactcacactgaactaaaccaccaaccttcctggctctccagtttgcagacagcagatcctgggatttctcagcctccataatcacatgagccaatcccgtgtaaataaatctccttttatatattcatatccttttataagcctctcttattggttctgtttctctggagaactctaatacagcaggggtgcaggacacacgatcaatatgtaaaaattcatatttctagcaatgaagtagcaatgaacaagtttggagattgaaattaaaatagagtaccatatacaatggcactaaacaccaaatgcttagttataaaccaaataaaatatgtgtaagatctataatctggaagctacaaaacaatgttggaggaaatccaggaagatctaaataaatggagaagcataccatgttcatggattgaaagactcgcttttattaagaaggcatttgccctgatttatggattcaatataatcaaaatccagcagatattttgctagaaaatgacaattctaaaatctctatggaaagccaaaggaacgagaagagactaaacagtctcggaaaagcacagtgagaggtctcacattacctgttctcaggacttagtgcaaagctacagtaacctcagcagtgtggaactagcataaggatgcatacatagaacaatggaaaagaacagagcccagacatgatgtgcacatacatggtcaactggtatttgacagagatgatgagagaatacaacgggaaaaaggaaaatcatttcaataaatgggattacaacaactgaacacccatacatgaaaaaacgaactttgatttaaacatcacaccatacacaaaaactaactcacagacttaaaagtaaaacctaaactacaaaactcgtacaagaaaacaggagaaaaatctgtgatcttggattaggtggagatatcctggataagactccaaaagcacaatccacaaatggggaaagtgatcaaatgggcttcatcgaaatcgtcaactactgcctcttaaattaaagcacttaacagcatgaaaagacaagccagactagaagaaaatatttgcaaagcaccacaaagagctggtatccagaatatagaaagcaccctcaaaactcagtaacaagaaaacaactcaatttaaaactggacaaaagatctcaacagacacatccgcaaagatacaggaatggcaaataagcacatgaaaagatgctcaatatcatcggctattatgaaaacacaaatgaaaaccacaatgaagtatcacttcacacccacaagactggctagaatgtgaaagtaacaacttgcacttttcatctatgtgcctagtgggaacataaagatggtgcagccactgtggataacaggtagtttcctgttaccattatatagagatgttttcatctacaactcatggcttgtaactcctataaacccttgttacagtaagcaggatctctctgacctcccacactcctttcacctgccagagagggtcctgcctcataccccagaggaaaaaacgcaacagaggccaagaagaatctgaacagacaggacttgctgggtttaaagcatgccctttttgaccaatcacatttccacagggctgtccatgcttcaatcgtgcctaagtcatgaagactctataaaaacccaaaggagctgggcgtggtggctcatgcctgtaatcccagcactttgagaggccgaggtgggcagatcacgaggtcaggagttcgagaccagcctgaccaacatggagaaaccccgtctctactaaaaatacaaaattagctgggtgtggtggcatgcgcctgtaatcccagctactccagaggctgaggcagaatagcttgaacccgggaggcagaggttgcagtgagccaagatcgcaccactgcattccagactgggcgacagagcgaggctctatctcaaaaaaaaaaaaaaaagcacagagcttggagagacttcagatcagatagctaacacgtggagattcccaaagggtggtatgcccgaacaggccatggaagctctgtgcgccttccccccatatctcactctacacatctcttatcttctaaaaaaaaaaaaaagagacaggatctcactgtcactcaagatggagtgcagtggctcactgcagactcaacctccttggctcaaatgatcttcctgcctcagcctcccgagtagctgggactataagcactcaccactacgcacagctatttttatttttttgtagaggtagggtcttgctatgttgcccaggctggcctcaaactcaggctcaagcaatcttcccaccttgacctcccaaagtgctgggattacaggcctaagtcaccatgcccagccacttggctaatgaaaaaaaaaaaatttcagagacggggtctcgcccatgctagtttggaactcctggcctcaagcaatcctcccatttcgacctcccaaattgctgggatttcaggcatgagccaccacacttggctccatctgtatcctttataatatcctttataataaactggtaaacctaagtgtttccttgagttctgtgagtcactcctgcaaattaactgaacccaaagaggggggtcatgggaatcccaacttgaacttggttggtcagaagttctagaggcagaagaggggcagtcttggagactgagccctcaccctataggttctgatgctatttccaggtagtgtgtcagaattgaattggaagatacccagctggtggctgctgcttgctggtgggggaaccctcagaagtcctgtgttgactgttgttgagtgggagaataggaaacacagtttgagtttttctacgagccagcaatcctcctcctgggagaaataaaaccacgtctacacagaaaaatacacaagaatgtttacggaggctttattcataatcaccaagacaggaaaccaactgactgcctgtcaatcaatgaacagatgaacacaacgtggtccatccacttgatggaatactattcggccataagaaggaaccaggccgggcatggcggctcatgcctgtaatcccagcattttgggaggctgaggcaggtggatcatttgaggccaggagttcgagaccagcctggccaacatgctgaaaccctgtctctactaaaaatacaaaaattagccaggtggggtggcacacacctgtaatcccagctactcgggaggctgaggaaggagaatggcttgaatccagaaggcggaggttgcagtgagccgagatcgcactactgcactccagcctgggcaacagagcgagactccatctcaaaaaaaaaaaaaaaaggaaggaagcacctacatgcaatacatgcaacacagaggaacttgaaaggcactctgctaagtgtcaggagtcagaggcaagggctacaaactgtgatgccacagatatgaccttctaaaaaaggcaaaaatgcagattcagaaagccaatctgtggttgcctgggggtgggagaggggctggtcctatcagagcacaaggggatttagggatgactcgttctgtagcttgattatagaggcggttccatgactgtctatgtctgtcaaaacaggcaagaccctatgctgaaaagggggatgctgactccatgtaaatgacaccctgatttttaaaatggggggaaaaacagaaaagatctaaagggctaaaatgttacagcacgcagacacacgggggcgctgtaaccaagtcttggcaacaacatgaaaatttggagcgtggaagactgtgaccctttgttgaaaactgctctgagaagagtatctgtttgtgcaaaggtatcctcttttctcaagccgaatcttaagtcacagggtcgagaacccaccagccacccagagtggaagacaggcagtgggaatttgacttaattttatcataaaccaagatttggaaagcagagggaagaatccaaccttgacttcactgaaagaaaatatataattgtataatctactgattgctcccacgaactctcacacaaagcacgttctcacgtggttaaatatctttcatgccattactttcaatggtttcacgatatttcatggtttgcctacacaatagttcactaaactcttactccaattcggagtgatcgaaggatgtcatttttcccatagtttttctctaaaaacctgtttttttattttattcttttttttttttttttttttttttgaagacacgggtcagggtctcgctctgtcgccaaggctggagtgcagtggttcaatcttggctcactgcaacctctgcctcccaggttcaagcgattctcctgcctcagcctcctgagtagctgggattacaggtgcacgccactgcatccggctaatttttgtatttttagttgagacggggtttcgccatgttggccaggctggtctcgaactcctagcctcaagtgatccgcccacctcggcctcccaaagtagctgtttttaaataccagccagacaccaagaactgtgtgctgggcactggataagacagcttcagaatccagaaagcgaattaactgggttgaaaggcaagaacaggctgggcgccagggctcacacttgtaatcccaacattttgggaggccgaggcgggagcatcacttgagctcagtagctcaagatcagcctgggcaacatagggagaccctgtctctacaaaaacgtttaaaaattagctggtgtggtagcacacgcctttcgtcccagttactcagaaggctcaggtgggaagatggcttgagcctgggaggctgaggctgcagtgagtcgtgatcacactgcactccagcctgggcaacagagagagaccttgcctcaaaaacaaaaaaaaagggtaagaacgataccatgtttcaatggagatcacagcttcgtaaaagagatgcttatagccatgagccgtcgatgacagactcacaactggcagcatgaagggctgatggtctcaaaagcacctgagtgaagatcccaaaatgcttccttcaggaccaggttgtgaccacctcccatgactagtttcggaattccagttgctcagaaccttgctcagaactgctgcaaatggaagctgggtgcggccttaccttttgggttgtcttcttttcatactgcagataccgggactcaatcactcttccacctgtggggacacactgttggtgcacaacaaaactacaaaggaccgaagaccccacacacccagaccccacgccccggagacccagatgccaggggccctctccactcagtgaccagaacagaggaggtcaccactcctcctgctcgcctctgatcacgtccttcggcagcctcaagcatgcatgggacgcctactgtatgcaagtcccaagccatgtgtggagtcacagagttcctgaggaagtaagatcaaggaacaccctccaaggtcaaagctgcaagtgcactcagacaagcgggagggaaagaagaaagagctttcactgacggcctccaggtggcttcctccttcctcccatctcgtgtgaccccaatggccccttcccccgcctgtgtgtctaggactcactcctggtactaccttttactccccccgccccttactcagtttgggaccccctgccctgagacatgcccaacacccaggccctcttcagacagagccaaatccctagtgacagcccaaccccaggtccccttccagggctactcctgggagcgtgactgtggatggaacaaatgccacctgtcaccccagcttctggaggtaggggtctgaactggatccggttagtcccattctgtcccccagccctctcccggacccctccctcaaaactgttcctcccacctcctacgccaggcccaacccttggtctcagcaggtgacctgtttcctccttcactgggaagacagaagtggccccaggagaccctcccgccaccacatccagccacctccagtcctgatggctgcattcccccggccctgtgaatggacctttgtgctcccagataaagcgccccccattctgggcgctaaagcccagccctcacttccaaaaggaaatgccccgcaactcccacctccctgcctgaatccccacagctcctctctccaccagatgctggaggtcattcttcctcctacctgcactctctgcctccccccatttctcccatccccttgacagcaaacaccccaagttctttattcaccagctcccctttctctcctttctccttcccttgaatcccgccccccacaatccagcttgcagacacaccaccgcaccagaacacctttggacaagaccaccgtgacctcccttgctcctgagcccagcagtccattctcagtcctggtcatctgaaccaccaggcacaaccactgctcgttccctgcttcctgaaaccttccatcagcctccaactgcccttcagggctgagacaggctggcgtgctgggtccatgggctcaggaagcctaagtgcctccgggaaccttctggaccctgtgccaccaacaacttgcctctaaccttatcactttgtcacctctcacttgctctattcagccgctctgccgcgtggacccccttgctgtgcatccccctgcaggcacctccctctctcaaggctctgctcagttcagaccacagcacacttgtctctgcctgccatttcgtcacagcatctgtcatcatctagcaaccccacagcctccttacggttctcatgcaatgcccacctcctccctagagccccaggggcccaggatttttgtctccttcgctcgctgctatgttccaccacctggtacggggtaggcactcgataatatgtcaaatgaatgattctaggccaggcgtagtggctcacgcctgtaatcccagcactttgggaggccaaggcaggcggatcacctgaggtcaggagttcgcgatcagcctggccaacatggagaaaccccgtctctactaaaactacagaaattagccaggcgtggtggcatgtgcctgtaatcccagctacttgggagactgaggcaggagaatcactggaatccaggaggcagaggctgcagtgagccgagatcgtgccattgcactccagcctggcgacagagttagactttgtctcataaaaaaaaaaaaacggttctgcattgtatcggtgccatagagctcagaggtttgcctttgtactgaagaggcccggggagagtgacatgctcaatgtcacacagcttgagagttcagccaagtgagattgtgactttgaccatatctttgttccagttgattcttctgttggggactggggttgcagctgctaccctgagaggaaaggaggtaccctcagagttaacaaggatccttcagtcagccaaagggccgggctgtcaatctgggcagccccagggtaggaatgcaccatgcctgcagagcgagtgtgggtgcaggtgggtgcccggcagatgtggacaatcggaaggccactctcatggtgcaggtctccaagggctgaggccaggaccaggtggggtcccagggacaaccaggccacaaaaagagtctaccctggatggtgatcgaacagctgagagaaaggacatccccagctcccagcagaaagaccatccagcccgggtctttctagtagcatcaggaaacagttttgctcaacaaggaggatctcaggcttgggctgccttggacggtggggaaacaaaagcactttcaagtttcctgaaaactaggatacaactgtttattttaaacagcctggctaggtgcggtggctcacacctgtaatcccagcactttgggaggccgaggtggacggatcacttgaggtcagaagtttgagaccagcctggccaacatggtgaaaccctgtctctactaaaaatacaaaaatgagccaggatggtggcagctcccagctacttgggaggctgaggcagagaatcgcttgaacctgggaggcgggagctacagtgagccgagatcacgccactgcattccagcctgggtgacagagcgagactccatctcaaaaaaataaatacaaataaataaacaggctgaattttccacagaagcaatattatgaagaaggatacaattcttgtccaagaacgaggtagctcataaatattatagctgttatatgcgagattaacatgcgatgtttagaatttgggaataagtggtcaggaaataaaaagacaacttacccagcaatgctgaaacatacaaaccttgcctcacttggaaataaaatcctgctctaagctcgctgaattgggccctgcgacactgcacacactgagaaaatacctcattgtatcatagtcttggcctccaatgatggactctagaatctaccatgcaagccgagcatttcctttttttttttttttttttttttgagatggagtttcgctcgccacccaggttggagtacagtggcgcgatctcggctcacagcaacctccacttcccaggttcaagccattctccagcctcagcctcctgagtagctgggattacaggcacctaccaccatggccggctaatttttgtatttttagtagaacgaggtttcaccatgttggtcaggcaggtcttgaactcttgacctcatgatccacccaccttggcgcctcaaactgctgggattacaggcgtgagccaccgtgtccagccacatttcctttttttttgttttgttttgagacagagtctcactctgtcgcccaggctggagtgcagtggtgcgatcttggctcgtgggggaggccgttaacggtgatcccagaccgataggtggaaatcagatgtacaggcacccctcatgagactgacacgctcacgcagtgggaattgagagtttgattttaggccgggggcagtggttaatgcctgtaatcccaacactttgggaggcagaggcgggaggatcacttgaggttaggagttcgagaccagcctgggtaacatagtgagaccccaactcaaaaaaaaaaaaaaaaaaaggcagagtttgatttttgataatgatctccatggtctccacacccacgcttccaggggacatgtcccggacacagcccatgacccccatggctgccaagggaagccactgctcaaaatgaccaccaccattcctgacacagccctcgccacagggctgggatggccagacccagaatccccacaggtgtgactacaaggaagtaaagccacaggcccccttctctggcctgtttttttcttcctccaaaagcacgtaatgaaagaagaaaaccatgttccttaaagagatcctgacactgcttaccttgaactcttttatccttcttcttggcactgctagaatttgtggggccggttgcaggcttcctgcaagagaagagagagaggtcttgttcacctcactacccaagaagcacagggaagccggcgaggtgcctctgctagttgaagctcagacagcccagtccaagggctgccagaggacaatttcagtgagggtgggccacctcaacaggaaaagggacacaaggagcagccagccctggtcacctgggcaagaaggcataggtgaacacccaaactgagaagagaggagggtaatgagagctctgtggaagagatcacagcagatctcaaattatccctgggttcattcattcaccagacattgatgcacctactatattccagtagagacacagtggtaacaaaacacagagctccttcccagaaagggaagaacaacatcttgacaggcaggtacgaggagtggtcccagcaggtacctcactttgggaggctgaggctggcggatcacgaggtcaggagatcgagaccatcctggctaacatggtgaaaccccatctctactaaaaatacaaaaatgagctggggtggtggcatgcgcctgtagtccctcctactcaggagactgacacaggagaactgcttgaacccgggaggcacaggttgcagtgagccaagatcacgccattgcactccagccagggtgacagtgagactccgtctcaataaataaataaataaaaataaaaataaaaataaaaatagaatgaagcctgatgtaataggaaagaagggaccctgagataggaatcgctgactcatcagctgtgggggtgcaggagagggagaatctgggatgactaggggtttcagggtttcagcctgagctggtgagaaaagaagggatccaagaacagacaccagcaacacaggaggggcaagtggatgggcaagtggaggggcagggccaaggccagggcactgtaactcctgctcccatcaccaaaggcggctccactggtccctgcggccacctcctctgaagcaggctcccaggaccccaaagtgagacccagacaatgttggggacacttccaggccaccgtggggagaggcaacttagcaaatgttcgccaggtgccagcagctgcgctcgcccgtaggctcctcctaacccgacagcttcctaactgttcacacctgctttttcgtcgctgcaaaacaaagacgcacaggttttacataggtcacccccggggcagtctcacagccagaaagagacaagagcacagactccctctggggactgtgctagggctgtggcctcaaaccgaatgggctcctgggtgaacctgctgcgacctgaggggggtccctacaacctgtgcgagcctcagctactgcacctgtacctgggaggtgctactgtcaatctatcggttacggcaaggggcggtggagtgattcctcttgctggccaatttcacttcagtttgcacctggcacaatcaacactggcagaattaacaaaactagacaaatatagcctcatgatcattcatgcctagctctcggtcagtattcaacttctttcttgttcatggtgtgttaccctaggcaagtcacttcccctccctgggtctccatcatctcctcagtaaactgggagcacagaataaagcgcgtgggaggattaaaggggacactttggtcgcccaacacttgttcactgcataacgataattccaagagcgacatcacagtaaagacccaggcgccgatctaagcgcgtttcagcctcacgcgacgcctacgaggttgagctgcgtcatcggccccatttcgtagcggaggaaagcgaggcactgggcggtcaggccgcttgccggaggtcgcccagcgtcccagccgaggacgcggaactcagggccggtcgggtgtcagcgctccggagcatgcgcagaggcagcacgccatcggggtcttcaggggcccgcgcagttcctggcggggtcgaacccgaactcaccccgagggtcctaactccccacctccgctgcccatcctctccagccctatggcgtctacaaatccagacctgcggaagccccaactcacccagcgcctcgccccgaggaatccgccattttcccgccttccacctcaaggcccgacccgccggcttttcaaagccggacccgcccccttgcttgcgggtcggaccatttgtggagacgcaggaggggtggctgcgaggcgtgaggcagcgccggctaagtgtggagagcgcggccccagacgcgcgcttcgcctgtcctcccctcgcacttggtctcgcccaccatcggcggtagtgggtaggggcggtgggtgggacctgatctgtcggacagtaggggcggggcttttcgcgatgccccgcccctaggagcgctggcgtcacgcccccgtccccgcctctccggaacccggaagcgggagcgcgcgggggagcggcgggcgcggcggggcggagcggctcgagcagcggcgggctggcaggcggtcgtccggccggggacccggcccgggaccggcggcgcgcggcggccgaggccaggtgagtaccaggcagcctcgggttggcgactcgagctcgaagcctgcctttgggggctgcgcagaagagggacggagctgagggctgatgggggacgcgacggcaggggtcgagggggcgggaacgagcctgggggtcttggagagattgctggggatgaggtggaagcgagacggtgaaggagaaagtggatggggatggagctggtgagggagttcgagggcgtggggggggtgagtcttgtggctttgagcagcttctctgaagaggacgtggcttaagtggtaattggggggtcgcaggaaacggcgttgtggggaggcacggaggcgggaacgagaggcccaggctgggggagtgggcaaggccaggggcgggacagccggggtgcggttgaggggaaggggtgcgagaccgatctggggacgtctgcccgcgcgattgaaggaagggtgtctgagaagagggcggcgcctggcccccagtgggcgctcagtaaatgcggggggttctgaactaactgatgcggcagccggctattgggaagcggggaaatgggagctggaagggaagtaaacggagtagaagtcacggtaagaactgagggtaggcttagggagggagggcccggagaggagggaagagaaggaaggggttagagtggccccgtgcagatagatgttgagatgcagcccctggagattccgtccccccaccctcccctcttgattcgtgtccctcctgacttcacacttaacagctgggtgacctgggacgagtcccaacaccctctgtgccagtgtcctcgtcttggaaacttcaccaccctccccttaagacaggactagcaggattctgggattccctggatccaaggaagggacctcagggccggttgtggggccggaactgtgtttcaggagggagtgtgcatgcaccctcatgtacaggactgtcgccacctccgcagagctgcatccttggacttaaatgggtaaaacgacatacaggaaatctgtcccccggttgctctgagctcagccctggagaggcacgacagccacgagccctcctttctttcctgggcaccctggaggccaggggtctttaagggatggcttctctgcctctttgtctgaggtgggagcccgtggggacactttccagccagagagtcccaactcggtttgttttttgatgttggagtcttcagaatcttaaggtgtccaggagcagccggaggtgacctgggctacaggaaagttattcacatctgacaggcctggctcttgtggccctggcagggactttgtgcagggtgcttttgattggcattcatttctcccctttcccaactgtagggatctttatctgggatctgccagaagggctggggaaccccagcttatgtttagtttatagctcattcaggagatgaacccggatagctggaatataaagagggccacagaaagataagcacccccttcacttccagaatatcctggcctttaggaaaggtggctttggcctggcttgccccaggacatgcagtgacagcccacagtcatgcctcctgcaaacattgaactgtaggcttgcactggcctacagaacaggaccgggatcttctgatcccgcagccctgcaatcgcctcttccctgccgctagagaatggccaagcagggtcttgtggggggagcactgtgttggagatcctggctttggtcaagtctctgtgcctgtttctgacctctcacctgcaaaatgaatgaattgacctccatcagcgtttttcaaccttgaaacccaactcttctcatcaccgtcttgtctccagtccatgtcccccagctcccggccttgaactcctcacagcacccccactctccattcctggctgcgatgatcctacttttattccgttttccattcgacagtttgtatccaaaaatgattttttttcaaccgcttcttcatcgtccaaatagaaaattgcggtgttgaaggtgcttttgcacattgcacctattcccaaagctttggaaactgcaaatttctggaaatcccgaggcagtaccgtccctcgggtccagtctggtgactcagtggagcaggtagagacgtgggaatctcccctttctgtttggctgtaggattcgttattctctccccacatggacttgttaacttgctgcttcccattcctcatctcttccaaatggtgtgtcttgggtgggcctagatttcagttaggcaagggttgattgtgccagacacttggtagattcctggggacagaggtgaatccttatgacccagaggacggacacgctaatgcccgcccccgacaactttgcacttcctcttcagaaagaatggagttcaagctgggccgcggtggctcaggcctgtaatccctttgggaggccaaggtgggtggatcacaaggtcaggagttcaagaccagcctgaccaatatggagaaaccctgtctccactaaaaatacaaaaattagcccggcgtggtgatgtgcgcctgtagtcccagctactctggaggctgagacaggagaattgcttgaacccaggaggcggagtttgcagccagccaagattgcgccattgcactccagtctgggtgacagagcaagatgccctcaaaaataataataattaaaaaaaagaatggaattcagatcaggtcatcagtacggtgacagaggggccacaagatattatggggggagaattagggacaaccaatgcaagctttaggacaagggggattccagcaagtttcctcggaagtagtggctggccccaggtcaaacctggaaagataccacgtgttaaaccactccgggtggaagggattgcacaagcagatacctttgaagcccggcctgtacagggcatcccagctctctcattctgccaaccggcagtgcgagggtccttgttcttatcttcctgatacagaaacaggcccaggcaggtgatgacttcagagatggttccttgagctttctagaaacatgcaggatccttagtaacctttaactggggaaacccaaatctccagggccgtttctcacccgcatcaccattgacagttggggctgtgcactgtagaatgtggaatagtgtccctggctgtcacccatgagatgccagtagtattccatcccctccaaggggtaacaactgaaaatgactccagccatggccacgtgtcccctgggggcagaatcacctcccccgccaggtgaaatgtgatgctcattagtaaaacctggttcccctctagggcccatcattgccttggtgggtccttggtgtttgtggagcccctgaggaactgccactaagagtgggaacaggggcagagaccaggaactgaatcctgccatccagtcagttcttaatcaggagggagcgggtcttgataaaaaggaggaaccgttaggaacggactgtgggagggtaggcaacgtgcccgagggtggacagcgggtgcccttgtcttttctttgtcttgtgactgacctggatttctggaggaactgtcctcgtcttagaatgatctgttgcttttcttctgagattagaggtattagattctctcccaagagctactttggaggttgccccggataaacgtcgcttttgtaagctgcattatctcttccatgggccctttcgcccgcccgttcccaagcacatactgctgaatttttgttcttggtccatcttgctgtccccttccctgcttggccccctccttgaccgtgactttgctgctttaccttgattggaggagacgctctggggccacgggactgacggtcccttctgggtgctgcccccacaccccacccaccagccctttgtgtgcccggcatccccagcccagctgtgccaggctgcccctgctcggccggccattcagacggccccaggcggcctctcggcaaagcaagacaagcccttctcttctgccctcgtggtccctggagtggcagaacaaagggctctgtctccacaccagcccaccgccgcagcccagagccccgttccctttcaatttctatcgtggctgggaaagagcctcagagattaggcatgtttcagaaatgcagctgacgagtttgggttctactcatttcctcagcgagactttctgagcccgagcccgatgataaataaagtagtgattcaagggttcagcccatgggttcgtcggagtgatgaataagatatccttgtctgactcacttgtttaaaacccatctctgccctgctgcacagggctgtatgtgcaagagaaggagccccgctaggggtgtttcatgactgttgttgctgggtgcctgagtttgctagggctgctgtaacagaaccgcacgctgggtggccagaacgacagaagtatattggcttgcagttctagaggccagacgtttaagatcacattcaagatcaaggtgttggcagggttcgtgccttcggagggctgtgagaatctgttccacgcctctctctgttggctcatacatagccgtcttcccctgggtcttcacatcgtcctccctctgtgcctgtctctgtgtccaaatttcctcttatgaggacagcagtcatatggaagggggcccaccctaatgacatcattttaactgaatcatccccataaagaccctgtctctaggcgaggcttggtggcacacgcctgtaatctcagccctttgggaggctgaggcaggaggatcacttgaggccaggagtttaagaccagcctggacaacatagcaagatcccatctctacaaaaaaatactaaaattagctagacatgatggtgaatgcctgtggtcccagcactttaagaagctgagacagacagatcgcttgagcctgggagtttgaggctacagtgagctatgatcatggcactgcattccagcctgggtgacagaacgacacccccatctcttaaaaaaaaaaaaaatcccaaatatactcatactctgaagttctgaggtttaggatttcaatatgtgaatatttctttgtggaggggagtggtggacacagctcagcccataatactgagaaaaggacaaattcaaattacatttttatttatttgtttatttattttgggggcgggggcagagtctcactctgtcacccaggctggggtgcagtgacgcgatctcagctcactgcaacctctgtctcccaggttcaagtgattctcctgcctcagcctcccgagtagctgggactacaggcgtgcgccaccacgcccagctactttttgtatttttagtagagatgggctttcattgtgttgaccaggctggtcttaaactcctgacatcaggtgatcagcccgctcggactcccaaagtgctgggataacagatgtgagccaccgtgcccggcctcaacttacatttttagataatataggaacctggagggaaatgatcgtgtcaatagagaataggtccattttgtctcttctcactcctttaaataaacactttaagggtgagcaggttggttggccacatcaattttggacgctccctgttttccagatctcacactcatacattcaggggtgactaaagagaggtgagaggcctggtgcagtggcttacgcctgtaatcccagcactttgggaggccgaggtgggaggatcacctaaggtcaggagtttgagaccagcctggccaacatgatgaaacccagtctctactaaaaatacaaaaattagctgggtgtagtggcacacacctgtaatcccagctgcttgggtggctgaggcagaagaattgcttgaacccaggaggcagaggttgcagtgagccgtgatcttgtgccactgcactccagcctgggcaagagagtaagatcccatctcaaaaaaaaaaaaaaaaaaaagaggcgaggacccagcccagggcggagtgggtcccatgggattttacaggggatgtgttgagggccaggtccacaaggctgcgtgtgcctggtggggaagcaggatgaagtttacaaacagggcatggggcgggggtatatctctgttctcagtattgccagggtcaggggcaaggaatatccaaaagtaactacactcttggacccaagtgaccttaggaccaactgctgtcacaagtgattgaacaaaagaagtttctggaaggtcttaaaatccttcagcaaaaaggaagtattggctgggagccaggctcagagctggcccttggggagactgaggagaacagaaatagccctcgcctctgttcagatgttcagccaggagtcacgagcatggaagtcaaattaacagcccagtggggtctgtgaaggtgccggcagcaggcgagcctgtgacgggagcctgcctggcctggggactcgcttatgggggaagtgggagacctgagagcttccccagtcagccgtgccctgggtcttctgcctgcgaggtgggcaccgctgcttcctcacgagtgaagtcacagcagcacagcagcagtgggaggctcaaggctttgctgtggatcttcctgggctcactgctcagagcatctccacgaggaggcgtctgccacctcctgcatcccattccagggcagacgagatcgggggcaggagggtgacatttgagattttgattcccagggtatgggtactcacgtggggctttaatttcctggtgaatgtgccatggggggcaaggggtagcttgcccactgcttgggaagacccctggggtccttgtcttgtcacgtggagatgctgtttattgggtaggcacaagaacaagagaggcggagaaagtgtgatcgtacttatttggcccataggtgccgtggaaactggttcctttcccctgggtggtccctcgggagtcaggcccatgatttagcagggaagggagaaggtaagggttggggtgtcctggagtgcagaaagtggcctgaaccggggcaggtacgtcctcaaggctggctccctcttgcactccgcactctcaatatcctgcagccaagtgagcgtggggttggaaccatgctaacatgtcaagtgcccgtgggtcctcgaggaggctgaaagtgtgtgaatcttgcttttttttttttttttttttttgagacagggtctcactctgtcacctaggataaagtgcagaggcatgatcttggctcactgcaggcttgacaacctccctgggctcaagtgatcgtcctacctcattctccctagtagcttgggactacaggctgtcaccaccacgccaggctaatttttgtattgtttatagagacagggtttcaccatgttgcctggtcttgaactcctgggctcaagtgatcacccgcctcagcctcccaaagtgctgggattacaggcgtgagccaccacgcccagccacttttctgattgatttaaagcatatcttctcagctgcagcattggtgacattgggggcagatcattctcttgggtagcagctgccgtctgcactgtagggtgttgaacagcatccccggcctccacccttcagatgccagtagcaccccctgctctgtgtctggataaccagaaatgtctccagacatggccaagtgtctcctggagggcagagtcagctctgggtgagaaacactagttccgggttctgttgactcctaagtgactttgcgtctgtcatcatctgactgaccgaagtcctaggatgctgccctcttttttttttttttttttgagactgagtttcgttcttgttgcccaggctggagtgcaatggcacggcctcggctcactgcagcctccacctcccagcttcaagttaccgattctcctgcctcagcctcccaagtaggtggggttacaggcacccgctaccacgcccagctaatttttatatttttagtagagatggaatttcaccatgttggccaggctggtcttgaattcgtgacctcaggtgatccacccacctcagcctcccaaggtgctgggattgcagatgtgagccaccatgcccagcccgcacatttaaatacacaaagtgaatggggaaggagagaggagagaaatcagagaggctaggtggattctcctggttaataaccctttgggttaataaccctttgggggccaagtgattacatgcctgtaatcccagcactttgggaggcggaggtgggaggatcccttgggcccaggacttccagaccagccttggcaacatagtgaatccccgtctctacaaaaaagatacaaaaattagccaggtatgttgacacatgcctgtggtcccagctactcaggaggctgaggccggaggatcacttgagcctgggaggttgaggctgcagtgagccaagatggtgccactgcactccagcctgggtgacagagtgagactcatctcaaaaaaaaaaaaaattattgggaatgtattctgtgtattctggtatttagtgtgaggaaagaatcaatttttttccaaataattaatgtagggtctctcaccctcagcactgctgatatttgtggctgggtccctctctgtggtgggaccctgagcaccacggggtgtggaccagcatttccagcctcaaccttcttcatgttggtagcatcctccctgtcccaacaacccttaatatgtctctgggccaggcgcagtggctcacatctgtaatcccaacactttgggaggctgaggcaggcagatcacttgaagctaggagtttgagaccagcctggccaacatggtgaaatcttgtgtctactaaaaatacaaaaaaaaaaaaaaagaaaaaaagaaaaacacacacacacacaaaattagccaggtatggtgtggtgcacctgtaatcccagctacttgggaggctgaggcaaaacaatcgcttgaacccgggaggtggaggttgcagtgagccaagatcatgccactgcactccagcctgggcaacagagcaagactctgtctcaaagggaaaaaaacatgtctcgggacagaggttgccaagtgtccctgaggacagagtcagctccaggggagaaacaatgatatagaagaacaccaagcttttgaggggcaagcagagcctgttgagacctacaggtcaagcccgtgactggcctgaggtgacttctttctcccctgcctttgtggtgtgatcaccagggtccctggcacagggatgagcttcaaggggagctggggagtggctgtttcaccgaagacactggtggcagcaaatcctgagaccattgtcccccaccatccagttccgctctcaggtgatcagaaaatggaacgagctccctgtgtcctttgtagaaaccaggcagagggtgggtttcatggccaggaggaggagcatctgtctgaaggccgcaagggctgggtcacagatgggcagcattgggagatcctggcaggcagagagcactccacgtggaaactagaagcatggggcagatggggggccaggtagcgagccacctaggcagctcagcagatgtggagaatgggaataaacttggggggtctttgggggaatcagtgggataggtgatagctaaaaggtacagggtttctttttaaggtgatgtaaatgttctagccaggggcagtggctcatgcctgtaattccagctctttgggaggctgaggcaggagaatcacttgagcccagaagtttgagactggcctgggcaacatagggagatcccgtctttaataaaaaaaaaaaaaaattgaaaaatttaccgaatgtggacttgcacctgtagtcccagctactccagaagctgaggtgggaggattacttgaacccaggagttcgagaccggcctgggcaacatagggagacccctgttcttaccctggggatggctttcctccgggcgtgacgacagatgagctgtgtgattgcacagcaggatacaagggtttttcctctgcccttccagacccgcgtccctggctgccctccctatcttcgttacaagcccacaggtcacccgagaaggacctgcagcccagccaccacccagtggctctgccttctacctgtgaccagaacccacctgtgtctcatgggcctgacccaggccactgtcagctcccgccaaggcacccacaggacgtgcttccaccaaggccccccagagtccatctgccacagatggtgacattttcttaatgtccctctggtcctggtgcccctgcatcaaaccacacggggctcccctgtcggacttgcatgaaaatctaaccacatttgcagggccctggaagatctgaccttccccatctcagcttctctctcccggcctccagccttggacccaccggccacactgggctccttgttctcagacccactctggccccgcctgcccattccccgccctcgcctgggctgctgtcctcaagctctgggcacgtccagctcgtttgcactgtacaggcctcagcaaccatttgccctgagcgccgccccacaggttcctatccccagcttccccaccttggcccggctcgtattggggccaattattttttgctgtgggggccgtgctgtgcactgtgggacactgagtggcattcctggcctccacctaccatttgcagtatcccctcgccacaagtggtaacttccaaaatgtctccatggccaggtgcaatggctcacgcctgtaattctaacactttgggaagctgaggcgggcagatcgcttgaggccaggagttcaagaccagcctggccaacatggagaaaccctgtctctactaaaaatacaaaaattagctgggtgtggtggcacacgcctgttgtcccagctactcgggaggctgaggcacgagaatcacttgaacctgggaggcagaggtaacagcgagctgagatagcgctactgcacttcagcctggaaaacagagcaagacttcgtctcaaaaaaaaaaaaagtctccagacattgtcagatgtctgtcccagcagggacagactcactgctggctgagaactgcagtgttagcacagttatgctggatttttcctccccaaagcacttatcactgttgctaatacctccttgctttgtggtgagtgtgttatccgtctccttcacctccccattctctctcctgtgcccagcatcagcctggcccggggtgagcactgaaggaacatttgttaaccatatgttgaaagaaggcagcctcctctgaaacatcagcacagatcacagggagggagaccccagggcctggaggggtgggcgtatagcacaggtcggagagcacttgggccacggggaggcgggtggccagaatgcgctgaaagaacacatacctgggaagggactttctccagggcgtggggtttagaacagtcaggccagatggaaggtctgggggaatgtcttggggaagacaagggacaaactgaacacgttcagaagaacacattcaactccccatgggtgagcgtggaattggcagaagtcacgagagagcatttgggatgagcttcttgggaatattcggctaaggcagaaaaaaggctggagcaaccgaagggctcacccagctaccttctggcctgagtgttccactcaaggtgttctgcactgggcaactggattcatgtcctggggcttccataactaagtacctatcctgggtggctgaggaggccacaagtctgaaatgaaggtgttggccaggcacggtgcctcacacctgtaatcacaatactttgggaggccgaggcgggtggatcacctgaagtcaagagttcacgaccagcctgactaatgtggtgaaaccctgtctctagtaaatacaaaaaaattagccaggtgtggtggtgcatgcctgtaatctgagctacttgggaggcggagacaggagaatcacttgtacctgggaggcggaggttgcagtgagccgagatcgcgccattgcactccaccgtgggcaacaagagcaaaactccgtctcaaaaaaaaaaaaaacgaaaattagccaggcgtggtggtgggtgcctgtcatcccagctactcgggaggctgaggcgggagaatagcttgaacccaggaggtggaggttgcagtgagccgagatcgcaccaccgcactccagcctgggcaacagagcaagagtccatctcaaaaaaggtgtcagcaggaccacactccctctggaggctctacgggaggacccttcctgcctgttctagcttctggggctccaggtgttccatggcctgtggccacatcactccaatccccacctccatctttattcacgtgccgccttctctctgtgtgcacatgtctcttttccttttataaggacgccagtctttggatttggggcccacccttgtccagtacaacctgatcttaactgactacatccccaaaggccttatttccaaacaaggtcacattctgaggttcgcggtaagcatgagttttggggagcacgaatgaactccccactggaaatgcctctctttgtaattttgccctgcggacgctgtttcttggccctgctggctcccccagctgctccccgaggagtttcccatccctgctctgtcccacccctaggacctggccccttagcagggcctgggccaccaatgatgcccaccaattcctgtgatgtcctgtaccagaccgtggtatgagcccattgacctctgcagtggattcttggaagcagccccacttactttgtttatttacttatttgtgtgtgtgtgagagagagagaaacaggatctgtctctgttgcccaggctggagtgcagtggcgccatcacggctcactgcagcctcgacctcccaggcttaagtgattctcccacctcagcctcctgagtacctgggaccacaggtgcatgccactatgcccggctcattttttattttttgtagaattggggggtctttctttgttgcccaggctggtctcaaactcctaggctcaagtagcctcccaaagtgctaggattacaggaataagccaccacgcctggccatatccccactttctgaaatgccccaaaagagcttagttcctccctcctgtcacctgcagtgggccatctcttggagttttcttaacaatttcttctcttgagtgtcctcttcctcccgactggcacgtgagcgtggccatcttatggttaggttgcaggtgtagaaaaatgaggacaaaggtctctaagtcgtcctcccactctgagccaccctgaccaataggctgactttgtggtcattccttcgtgtgtgtgtgtccatctttcccatactgcccatgagcgtttcttctaaaaaaaaaaaaaatcctcaacaggatcagggaaatgtacacaaaatgtgaaatgcactgaatgctgcacgatgcatcctaaatgagtctgctgtaatgctagttagccttcccttagcttgagaatgatttcatcctataaacatgtggcttcaaattatggccttatataaacgaaacggctacgccacactttctggaggccccgtccggaggcctttattctccagtaaattccgaatcctccgccaaactggtaggcagaaccctactttctgtgcagccggccttgagagcggctaattcacatccggccactgacccccacccccagggcctgttttttttcgttgtcatgcctttccttgcacctcctttctatgagaacacaaggaaaaggccctgaattgagattggcattttttcagagtgcagaaagcatatactggcctggttttacatagccatttctttttgcaccgctccgtttttttaaaaggagtgatcatttttattgtagtgaaatgcacataacgtgtaatttatcatgagtaacattcagtgcattcacagtgttgtgccaacaccagctctatctgattccagaacactttcattccccaaaaggaaaccccgtccccattagccatcactccccactcctcatcccctagctcctgacaacgactcatcactttctgtgtctgtggatttgtctgttctggcattctggacatttctataaatggagtcacaccccatatggtctttcgtgtctgacttctctcactcagcatcatgttttttagtttcatccacgttatagcatgaatcggtgcttccttcctttttttttttttttttttttttttttttttttttttttttttgagataaggtctggccctgttggccaagttggagtgcagtggcacaatcttggttcactgcagcctctgcctcccaggcccaagccatcttcccacctcagcctcctgagtagctgggattacaggcacacaccaccacacctggctaatttttgtgttgttttttttctgtagagacgaggtttcgccatgttcccgaggctggtcttgaactcatgagctcaagcggtctgccggccttggcctcgcaaagtgctgagattagaggcgtgagccgcctcactcagccttcattcctttttatggccaaataatattctgttggatgaatgggccacgttgtgtttttccatttatccgttgacaggcactttgttaccactttttggcatttcttcgaggatctttatagtctgacagtttgattttcatttggtgacaaggggattgttcttacacaaggccttggtcgtactgatgctgtcagctggaggatgtattttgcttcctgttcacattgtctgtgcgtgggatggtcatgagtcaggtggtagagcgggtgtgttagccttggggtattttggtgagacaattcggtttaaggaaggaaacacgttttcaggacccgtaccccaaaacacaaccataacccgaggtcgccacttggctgagctgtcccccacagggacttcaggtccctggttcctccatccccaatctgcttccttccattcccgccagaaccagggtattttccaagggcaggtttcacatccacttggggcagggatcttaagccacagtaagactaatttccaggtcccaggtctcctgggaaaccccaaaagactgagccctgccgagtgagaacattctctgaagctctgataatcaaaacagcgtggcacctcacaagcctcagcagcccagaggcggaccacatgtataaaataacgccatgtgtagtatttaacaaaggaggctccccaatccagggagggaaggattctttcacaaaaggcatgaaaacagttgcttccatgtttggaagcagttttgttttgttttttgtttgtttttttgatacatggtcttgctctgtggcccaggctggagtgcagtggcatgatcacagctcactgcagccttggcctcatgggctcaggcaatccccctgcctcggcctcccgagtagctgggattatagatgtgcaccaccacgcccagctaattttttaattttttatagagatggcgtcttgtggccaggcacagtggctcacacctgtaatcccagcactttgggaggccgaggtaggagggtcacttgaggtcaggagtttgagaccagcctggccaacatggtgaaaccccatctctactaaaaatacaaaaattagctgggtatggtagtgttcaggcccaggtatagggggtcagcccagagctgtgggtgaaaggacaggcccatggtcccacctgtgggagcaggagaggaccaggccgatgagccttgcagggggcacgccagcttgtggtcccagctagtttctgctcccaccacccccatcccactcccagggagggatgtcccttctagggctacccccttccctgcagccctggctgctcagcagccgccttgagcaagcccttatccacttcctcctggcctgggggcggggcacgcatctgccagtcctgtgaccgtccccttcagccccatctctgagagtggggtttcctgagagtctgcccttctgccccgcacaccaggggcccagagctgcagaagcccccacaggctttgttcccagcagggctcagagggctcctggtgctccatcagcagtccctggaggacacggagcagtctcaagtgcagccgtccatgtggccttcagcccttgtgattccatgagctagcatcagccgtcccctcagtgggtggcagaggctgccgggagcagaagaaagagcccatccttgggttctcctggcttctcgctcagagctgctctctgctgtgaaggaggaagtaggcatatcccagtgagttttgcgtcgcctacatccaggcagctcagccataagtcagcccaaagcccgccagctgggagctgcactgagcccctggtcacaaaagtgaacgtcacaggacgggccaactctgcccaggcctcgctgtgtgcacatacacaggtgtacgcatgtatgtaggcatgaacatgtgggtggacatgtgcatgcaagtgttttgtgtacaagcatatacgtgtggctgggcacatgtgtgtgcatgagtgttcatatggaagtatatgctgggcgaggcggctggatcacttgaggctagaagttggagaccagcctggccaacatggcaaagccctgtctctattaaaagtacaaaaattagccagacgtggtgatgcacgcctatatcccagctacatgggaggctgaagcacgagaatctcttgaacccagtaggcagaggttgcagtgagctgagatcgcaccgctgcattccagcctgggtgacagagcaaggctccgtcaaaaaaaaaaaaaaaaaaaaagcgcttgcacatatgttttttcatacctgtgtccttgtatgcatgtgcatgcatgtgagtgtgtatacaagcatatgactatgtgtacaagcatgtgtgtgcatagtgtgtccatgtgtgtgctgtgtttatatgagcatgggtgtgtcctatgttgtgttcacagaggtgtgttcatgtttgtatactgtatgcacagaagtgtgtgtattcacatgtgtttcctctgtgtacatgcaagcacatggaagtacatatgccagtgcacacacacattcatgcatgtgtgattaagacatgtatcttggccaggcactgtggctcacacctgtaatcctggcactttgggaggctgaggtgggcggatcacctgaggtcaggagttggagaccagcctgaccaacatggtgaaaccctgtctcaaccaaaaatacaaaaaattagctgggcgtggtggtgcacgcctgtaatcccaactacttgggaggctgaggcaggaaaatggcttgaacctggaggcagaggtgcagtgagccaagatcgtgccactgcactccagcctgggcaacaagagtgaaactcccatttcaaaaaaaaaaaaagaaaaagacatatatcttcggtttgggctcctgtattccttacctggattagaagtgcgtaaacctctgtccatcttccttggccctgtggagctgcctgggaacattccatgattaactctcgtggcgtcctgggacgaccaggtgagcgataccatgtggcacctgggaacctgacgtacctttagatttccgaccatctccctgctgtggtgtctgaggaactgtgcctgggctcaagggctgaacttttgaatacagagtaagaagttttagaaagataaactcctggggaaatgggatcttttaaatccatgtaatttttaaagcagtttttttgcggggggtgggggggggggtggtttgagataggttcttgccctgtggcccaggctgcggtgcagtagtgcagtcactgctcactgcagcctccacccgctgggctcaagtagtcctgccacctcagcctcccaagtagctgggactaaaggtgtgtgccactatgcccagctaatttatttatttatttatttatttatttatttatttactttgtagagttacctagttgtgtggcccaggctggtgtcaaattccttggctcaagcaatctgccctcctcagcctcccaaagtgctaggattgtaggcatgagccactgcagctggctttgttgttgttgttgttgttgttgttgttgttgttgttaagacggagttttgctctgttccccgggctggagtgcaatggcgcaatctcggcacactgcaatctccacctcccgagttcaagggattctcctgcctcagcctcccgagtagctgggattacaggcatgcgccaccatgcctggctaattttgtatttttagtagagacgggatttctccatgttggtcaggctggtctcgaactcccaacctcaggtgatctgcccaccttggcctctcaaagtactggaattacaggcgtgagccaccacgctcggccaagcacctggcctttttaagcagttttatccaggtgaaattgttgcataataggctgcacttactcagtgtgccaacagccatgagcccaccaccacgaccaatgccataaacacatccatcatctgaaaagtgtcctcaggcctcttggcatccctccccactccacatccccaagcagccaccgatcagctttctgtcttcataggtcaatttgcattttctagaatgttatatacatggaatcatacagtataggctctttttaaaacttaattaaggaaaagtcacaaaaggtaaaattcaccatctaaagtgtgtaatttggctgggtgtggtagcttaaacctgtaatcccagcactttgggaggctgatacaggcagaatgcttgagcccaggagtttgagaccagcctgggcaacatgatgaaacccagtctctactaaaaatacaaaaattaggcaggcgtggtggcatgtgcctgtagtcccagctgctcaggaggctgaggtgagaggtttgcttgagccaggggaggttgagactgcagtgagccacaattgcaccactggactccagcctgggcaacagaatgagatccagtctcaaaaataaaaatttggccaggcgcagtggctcatgcctgtaattccagcactttgggaggctgaggtgggcagatcacttgaagtcaggagttccagaccagcctggccaacatggcgaaactctgtctctaccaaaaatagaaaaattagctcggtgtggtggcggatgcctgtaatcccctgagattggaagggaggctgaggcaggagaatcgcttgaacccaggacgtgaaggttacagtgagccagggtcgcagcactgcaatggagtgcaagactgtgtctcaaaaaagaaaaaaaaattaagtgtgctagtcagtgcattcaccgtgttgtgcaacgaccagctctatctgattccagaacattttcatccccttaaaaggaaacgcggtccccatgagcagtcactccctattccccctcccggagtccctggcaaccaccaatctgcttcctgtctctatggatttgcctgttctggacatttcatatcaatggaatcatacaccatgtggcttttttgcgtctggcttctctcagcttcatgtttttggggttcatccatgttgtagcacggagcagtggttccttcctttttatggctgaatcatactccgttgtgtggatggaccacgttttgtgtatgcattcatctgccgatggacatggggttgtttccacctttcggctattgtgaatagagctgcagtggacattggtgtacaaggaattgagtcgctgctttctattcttttgggtctatacctgggagcagaattgctacgtctgtatgtagttatgtaatctcttttgtcaggcttcttcttttttttgagacggagtctcgctctttcacccaggctggagtgcagtggcgcgatctaggctcagtgcaagctccgcctcctggattcacaccattctcccgcctcagcctcctaagtagctgggactacatgcgcccccccaccacgcctggcgaatttttttttggttttgtatttttagtagagaaggggtttcaccgtgttagccggaatggtctcgatctcctgacctcatgatctgcccgcctcggcctcccaaaatgctgggattacaggcataagccaccgcactggccttgtcaggcttctttcactcagcccaacaattctgaattggtttcctatcactgtgagcatcaggaaccagccatcctgaactcgttggttccttctcattgttgaaccatattccatggtgtggtcagtgtgttcattcggtgggtggacatttgggttctcagtttgggactctcagaagttacacgtctctgtctcgacatctgcttcatttctcctgagtaactcctgagaggggaattgcagggtcacgtgctaggtatgtgttttaacattgaaagaaactgctgaagtgttttctaaagcagatgagggccaggcacagtggctcatgcctgtaatcccaggactttgggaggtcaaggcaggtggagttccagaccagcctgggcaacatggcaaaaccccctctctgcaaaaaaaaaaatacaaaaattagctgggcatggtggtacagtcagaggatcacttgagcccaggaggtcgaggctgcagtgagctgagatcatgccactgcattccagactgagtgacagagtgagaccctgtctcaaaaaataaaaaagcagatgagctgcctcgttcagatagtttgttgttgttgttgttgttgttgttgttgttgttgttgttggttttttttttttttttggagacggagtctcgctctgtcgcccaggctggagtgcagtggcatgatctcagctcactgcaagctccgccttccgggttcacgccattctcctgcctcagcctcccgagtagctgggactacaggcgcccgccactgcgcccagctaattttttgtatttttagtagagatggggtttcaccatggtctcgatctgacctcgtgatccgcccgcctctgcttcccaaaatgctgggattacaggcgtgagccaccacgcccggcctgttgttgctgtttttaagaaatagagtctctgccaggtgtggtggctcacgcttgtaaatcccagcactttgggaggccgaggcgggtggatcacttgaagtcaggagttcgagaccagcctagtcaacatggctgtctctactaaaacagagaaacactgtctctactaaaaacacaaaattagccgggcatggtggtgggcccctgtaatcccagctactcaggaggctgaggcagtagagttggttcagcccaacaggcggaggttgcagtgagccaagatcacagcactgtgctctagcctgggtgataaagcgagactccatttcaaaaaaattaaaaaaaaaaaaacagcatctcgccctgttgctcaagctgtatcttagatagtaaaaataaaaataaaaataaaaataaaccaggctctcaaagctttatctcatgacctggaggaacatacaaatgcactgacatatcaaggaaagaattaggttttacagctaaatggataagacaatccaaaatttattaaactatacagtatatatctatttccctgggagaaaacatgacagttacttactaacctgggggaaagttttaagagttaaatcttgtgtgtcccccagccttcttccctgtcgccactccctatccctgtgtgaactgttgcctcggcctcataagttatcgtttctttcagcctcagcccttctaacacttctgcaggaattctcagagcctctagtggccctgaccccactcagtcacagtgctgagtcatgcttctctttagggcagaggtcagcaaacctttgctttgaagggctggatagtaaatattttaggctttccaggctgtaatattacagtctgtgcctgaactatttcactctgctcttgtagcaaaagcagccacagacaataaggaaaggagtgtgggcaaggctgccttccagtaaaactttatttataaaaacaggtggtgggcctattgtaccatcctttattcttctactcacctcgtgaacgaactcctcttcatccttcagaaccccccccccccaccttttttttcttcacgatggagtctcactctgtcgcccaggccagaatgcagtggcatgattgcggctcgctacaaccttcacctcccagattcaagcgattctcctgcctcagcctcccaagtagctgggattacaggcacccaccaccgtgcccggctaatttttgtatttttagtacagacagggtttcaccatgttggtcaggctggtcttgaactcctgacctcaagcagtccacccgccttggcctcccaaagtgctcggattacaagcgtgagcgaccgcgcctggtcttagaacccctcttagatattcctactcccctaatgtcttctcttgtcctttaggataatcactcctgctgtgtgtcttttaactgctgcgctggattcacgtctacactcacgtctgtttgcataccagtctctcctgcctggctttgggcctcatcttcacaccctcagccattcttggttgactcatgccgcatttatggctcttgatccaagcccctaggtgggctggcaccagcatttctttttcttgcaaccttcagaagcaaatgcactttttaggaataaacttggccgggcacagtcactcatccctataatctcagcactctagggggcctaggcaggtggatcatttgagcccaggagtttgacaacaacctgggcaatatagtgaggcccccatctctacagaaaatacagaaacattagccagcatgcatcgtggtgtgcacctatagtcccagctacttgtgaggcagaggtgagaggatcacatgagcccagggagatcaagtctgcagtgagccgtgatcatgccaatgcaccccagcctgggaagtagagcaagaccctgacaaaaaaaaaaaaaagaagaagaaactgggcgaccctctctcttaggaaaaaaaaaaaaaagggctaggtgcagtggctcacacctgtaatcccagcactttgggaagccgaagtgggtggatcacaaggtcaagagattgagaccatcctggccaacatggtgaaaccccgtctctactaaaaatacaaaaattagttgggcatggtggtgggcgcctgtagtcccagctactcgggaggctgaggcaggagaatcacttgaacccgggaggcagaggttgcagtgagccgagatccgccactggactccagcatggtgatagagtgagactccatctcaagaaaaaaaaaaaaatgaagagggtgaattttggggagctaaacaatctatatacgtggacataacagagcagaatagttattggggactgcagaaggtgatggggggaggagggtgagggtgaacaaatttcccgttgggtacgatgttcactattcaggcaatgtgtatcccaaaagcccagattggcctggcgcagtggctcactcctgtaatcctagcactttgggaggccaaggcgggaggatcgtttgagcttaggagttcaaggccacctagccaacataatgagagcactttggaagcccgaagcgggtggatcacgaggtcaggagatagagaccatcctggctaacatggtgaaactccatctctactaaaaatacaaaaaaaaattagccaggcgcggtggcgggcgcctgttgtctcagctactcgagaggctgaggcaggagaatggcgtgaacccgggaggcggagcttgcagtgagccaagatagcgccactgcagtccggcctgggtgaaaaagcgagactgtcttaaaaaaaaaaaaaaaaaaaaggccgggtgcggtagctcatgtctgtaatcccagcactttgggaggccgaggaggatggatcacctgaggtcaggagttcgagaccagcctggccaacatagtgaaaccctgtctatgctaaaaatacaaaaaaaattagccgggcgtggtggcggggtgcctgtaatcccagctacttgggaggctgagacaggagaatcgcttgaacccaggaggtggaggttgcagtgagccgacatcatgccactgcactagagcctgggcaacaaagagcgaaactccatctcaaaaaaaaaaaagcccagacttcaccactacacgatatatgtgtataagaaacctgcacttgtaggccaggcgtggtggctcacccctctaatcccagcacttagggaagtcgaggttggcacatcacctgaggtcaggagtttgagaccagcctggccaacatggcaaaaccccatctctacttaaaaaaatacaaaaattagccgggtgtggtggcgcatgcctatagtcccagctactcaggaggctgaggcagaagaattgcttgaacccaggcagcagaggttgcagtgagccgagatcacaccactgcactctagcctgggcgacagcacgagactcttatctcaaaaacaaaaaaagaaaaagaaaagaaattggtattggcagactgctacttaccaccttcctggtgtgcttctggtgtcactagctcttccattcaagccctctctctggtagaggatcctttccagggagtcctatcgcattgagaatctcctgtggtcttggacagctagctcctcagtctttccttgttgcccgtgaccttggcagtcttgggaccaccagccatattcctgcaggatgcccccagcctgggcctgcctgatgttcttctccccagtagtctggagttgtggcttcagaagcaaccacactctaggccattcccgagtgcatttttcgtggctctcccggacttcatcttcctaggttgggtttcaaggaccctggagttttgggaatcccaaatttcaggacaggttcagtcttgctcatccccacatgcctctcgctgttactgctgtgtggccaaggcctgtggggccgagtcgtcttctgcttggggagctgctggggaggtttattcagagatgaggtcaggaaggatgtgggctgggaagggcatagcagaaagagggtcatggcttgttgggcttcaggattgagaggctgcctctggatggggtgggatgggggctgggatggagcaaactcaggggaagggtcaggtcttggggttgtctgatgatgtcacttgtaaaagccactgtatttttttttaagtgacagggtctctctctctcacccaggctggagcacagctggtataatcatggctcactgcagcctcgatctcctgggttcaagtgatcctcccatctcagcctcctgaggagctgggaccacaggcgagcaccactatgcctttattttttgtagagacggggtctcgctatgttgcccaggctggtctcaaactcctggcctcaagcgatcctcccaccttggcctcctaaagtgttgggattataagcatgagccactgcaggagcctgaggtcacattgaaggacagacagaccctcacgggatgtcgtgactggttgcctctggctttttgggcgagcctagtcgggtggggaactccagcatcgggtcaggtgctatctgcccaggagtgggactccacatgccccttaaacttcctcccaccattctgaccatgcctggctctgacctcccttctagctccaggacacgcgcgccccgagcctgggaggcatgctgaagccaggcggccggcaggatgagtgtgaaagaggcaggcagctcgggccgccgggagcaggcggcctaccacctgcacatctacccccagctgtccaccaccgagagccaggcctcgtgccgcgtgactgccaccaaggacagcaccacctcggacgtcatcaaggacgccattgccagcctgcggctggacggcaccaaatgttatgtgctggtggaggtcaaagagtcgggaggcgaggaatgggtgctggacgccaacgactcgcctgtgcaccgggtgctgctatggccccggcgggcacaggacgagcaccctcaggaggatggctactacttcctgctgcaggagcgcaacgcagatggaaccatcaagtacgtgcatatgcagctggtggcgcaggccacagccacccggcgcctagtggagcgtggcctcctgccacggcagcaggcggactttgatgacctgtgtaacctccccgagctaaccgagggcaacctcctgaagaacctcaagcaccgcttcctgcaacaaaagatctacacgtacgcggggagcatcctggtggccatcaacccctttaagttcctgcccatctacaaccccaagtacgtgaagatgtatgagaaccagcagctgggcaagctggagccacacgtcttcgcgctggccgacgtggcctactacaccatgctcaggaagcgcgtgaaccagtgcatcgtgatctcgggtgagagcggctccggcaagacccagagcaccaacttcctcatccactgcctcaccgccctcagccagaagggctacgccagcggcgtcgagaggaccatcctgggtgctggccctgtgctggaggtgagcggggaagctggtcggtctgtgggagggggcatttgtttggaaaatgcgggtttcaggccaagctcggtggcccacatctataatcccaatgctttggaaggctgagggaggaggattgcttgagcccaggagttcaagatcagcctgggcaacatagcaagatcttttctctacaaaaaaaaaaaaataattagccaggcaggcatagtagtgctcacctgtagtcccagctgctcaggaggctgaggcaggaggatcacttgagcccaggagttcgaggcttcagtgagctatgatcatgccactgcactccagcctggatgacagagagagactccatctcaaaaaaaaaaaaagaaagaaatttcaggctgggtgtggtggctcatgtctataaccccagtggtttttgagaggctgaggcaagaggatcgcttgagcccaggaattcaacatcagcctggtcaacacagcaaggccccctctctacaaaaaaaaaaaaaaaaagattaccgaagtgcggtggcacacatttgttgtcccagctattggagaggctaaggcgggaggatcgcttgagcccacgagttggagctatgattgcactactgcactccagcctgggcaacagagacagaccctgcctctaaagagagaaaaagtggaggttttctgattgttgttattattcaggtactgcgaagccaactggtcaggatgcaactgcctcttggaaagagagtttgttactcacagttcccgaaagaagaggatgcaatgccatggaaggccacagggggaagcactgggactcatcaggaggctgagggagagagggaaaaagggagcggggagaggcaggaaactttattgtgattttcatgcatcagaatgtgctaggcagagtaagctggcttaggattggcttgtttgaattatttcaatgggctctggggcataggggctgccccttgttgtcaggtgccagggcctggggtgatgagggcaggggatagtgggctggagtgtgagagtcccagagaggaggtggctggggtgtaggctctggactggttggtttgcatatggaaggcaagtcccaaaccatctctaggaactggctagaatcaatctaggaattgggaagggccgtctccctggggtcagccaggccccagatgtcagagcatcagaaatacagaaaataagtcactgggcgcggtggctcacacctgtaatcccaacactttgggaggctgaggcaggtggatcacgggaggtcaggactttgagaccagcctggccaacatgatgaaacctcgtttctactaaaaatataaaaattagccaggcatgatggtgtgtgcctgtaatcccagctactcgggaggctgaggcaggagaatcgcttgaacccggtaggtggaggttgcagtgagccaagatcgcttcactgcactccagcctgggtgacagagcgaaactccatctcaaaaaaaaaaaaaaaatagtcacagttaatacacatttggcttccagaacatggccattcattctcaaggtgcctgaaagaaaaggctggtgtattcaaaccagtttgaggagtgcttcacaacgggacatttctagggggaccagcagggtggaaggaagccagcaaggcgtacggcaggcctgggggttaaggggatggcgaagcattgtcggggagggggctgcctagtttcactgtagaggcagcagagaagggaccaacccaggctcttatgcctcatgccctctgcccactgttcattgccctgatcagccaaaccccacaggagccctcgatgtgccactgtgggtgagtcttgtggccacagggctacagaggtgaccacacagcacccatcattgcagggattgtaggacaaggtgcatccacatgtctcagaacaacgcaaccatcgccacctggtgagggccaggggcagcgtgtggcctcaggggtctgcacctctgggtgtgggatctgcctttttttcatttttattttattttttgtagagatgggggtctcactgtattccccaggctggtctcgaactcctggatgccaatgatcctcccaccttggcctcccaaaatgctgggattataggcgtgaaccactgtacccagctccgcttaaaaaaaaaacaaaaaaacagattggttgttttagagcagttttaggtttataaaaataccgagcagatagtgcagagagttcccatgtacccctcccacgcccaggttctcacattatttatattttgcattcgtgtggtgtgttggttgcacctgactcaactctacgttggtactgttactaacagccatagtttccattagggttcttggtgttgcacattctttgagtttggacaaaagtataatgaatgtgtctgccgttggagtgtcacagagtggtgtcactgccctaaaattcctccatgctccccctgttcatccctccatgacctttggcagccacagctcttctcactgcctccacagttctgtcttttccaggctgtctgtagttggagtcccagtgttgcaggcttttcagactggcttcttccacttcacaaccagcatttaaggttcctgcatgtcagttgggcacggtggcttacataatcccagtgcactgggaggccgaggcaggaggatcacttgagcccaggagttccagatcagcctgggcaacataacaagaccctgtctctaccaaaaaaaaaaaaaaaaaaaaaaaaaattagccaggtgtggtggtgtttgcctgtggtcccccctacgtgggagtctgaggcaggagaatcgcttgagcccgggaggttgaggctgcagtgagccaacgtctggccactgcactccagcctaggtgacagagcgagaccctgtcccccaaaaaaaggggagaggagattcctccatgtcttttcgtggcttgagagctcatttcttttgctgaattgtagctcattatatgaatgtgtcagtttcttcacacgtaggatcctgagagccccctcagtggagagagggagttgggggcagggtcagaccccaccctttctggagccttgacctctcgcctcttgttagtccccacaagctgagggctgccatgcaaattcactgaaatcacatctaagcagtgcctaggaatacatttcagttcctcttcctctctgaggtcatcagtaagacattaattggggtcatacaacttagccctggtccgacatatgtagcctattcctgttttctcctgtgcaagtaacacagagattcattgtcattgtttacatcagcttttaataaaactgctgagcaatttcaccatagaatgtccattttctttcctttcccatcccctcccctcccctcctctcccctcccctctcctcgcctctcctctattcctttcttgtcagggtctctctccgttacctagaatggagtgcagtggcacaatcataactcaccgcagcctcgagaacttctgggctcaagcgatcctcccacccaagtagctggaattccaggtgtgcaccaccatgcccggctaatttttaaattttctgtagagacacagtcttactatgttctccaggctggtctcgaactcctggcttccagtgatcctcccacctcagctgtttttaatatggcttgtcttgtgtgcattacattatatacccagaccgcccgttcattgctgtgtgagcatttgctgtgtggcaggctatgatataggtgctgggctatgtggtggccaaagtcaacacaaaattctccccaggtagaactcggggaagactctgggtgacacaggagctatagaggttctgagcagaggtagatgcaacccagctctggtctcccgaggccgccctggcgtcatcccagctctgagactcagccacagtgaaactgccagtggccccagtgtcctcccagcaggtggccagggggctcaacggctctccaggccaaaacatcagtgcctggcatccacacccgagataaaacagtgatcttgaaaattcagcatgtgtggcacacacctgtaatcccagagtcaggaggctgagtcctgagtcaggaggattgcgtgagcctaggaattccagaccagcctgggtaacattgcaagaccccatctctaccaaaaagtttaaaaactaggctgggtgcagtggctcatgcctgtaatcccaacactttgggaggccaaggcaggtggatcacctgaggtcaagagttcgagaccagcctggcaaacatggtgaaaccccgtctctactaaaaatacaaaaattagccaggtgtggtggcgagcgcctataatcccaggtacttcggaggctgaggcaggagaatggcttgaacttgggaggtggaggttgcagtgagccaatatcgcaccattgcactccagcctgggcaacaagagcgaaatctgtctcaaaattaaaaataaaaataaaaaattagccaggcatggcagtgcatgcctgtggtctcagctctcaggagcttgaagtgggaggattgcttgagcccagaagttcaagactgcagtgagctgtgatcacacactgcactccagcctgggtgacagagcaagaccctgtctcaaaaaaataacaaaaaaaatttagtaggtgaatgaatgagagggtagatccaacatttaccatgtcagacattttgccaaatgggactaggcaggtgggtaaatgcctgagccccgcagaaatgacacgcccagccccagggtctcaaagtggcacggccaggaggcaggattgccacctaggtctcagttcagggtccatgtcctccccaccacgttgctgcctccacagcgccatctcactaggaccctccagggcgtggacaagtttcctgttgctaagtgttaggggcaagggagtctccaacaacagggattaaggctctcatggtcctggaggccagaagtctgaaatcaaggtgtccacggggccgcactccctcccggctctgggggaggatgcttcaggcctcttcagcttctctggtggctgcagatgtgccctggcctgtggccacgtcacatcagtctctgcctctgtcgtcaggggcgttcttcctgtgtgtccatgtcttcacgtggctttcttataacaaggacaccactcatgggatgtagggcccatcctaccccggcatgacctcatcctacctaattgcatttgcaaagaccctatttccaaataaggtcacatacacagtttctgggggtgaggatgtggatataattttgggggcggggggctcaagtcagcccacagcatcccccatacagccccacctggtctgcttcaagtcctacctggcccctggcaagtcccacttggtgacatcttgtgcctgggtccttgagggctgccccagatccgcgattgtcctggggaccggtagttcctccccggatgccagcaaagctccctccagcctccacgcctgcacagtctccagtatgccttcaacagccattagtcaccctctgtgagtcagacccccggtcctgccaggccaacctgcttggggcctcagcagcgggggctggcgaggccagttttctccagcggttctaagccgctcgagggtggtgcccacgccggcttccaaaacaggcttgagccaaatccacgtcatggcaataaacgtgcttcctggggcgactgtttgcaaagggatgtgattgtcttcactgagagctggatttctcaacctggctctgctgacattcagggccggatcgttctctggggagggagtcatcctgtgcattgaaggacattgagcagcatccctggcctccacccaccagatgccaggagcactccccaccccgcaggtgtgacacccagaagtgtccccagacatttcattgattagagaggtattaacaaaatagcttcccgttgtcccctggggacaaatcaccccctgggaatagaacagctgtctttgagttcttcccataagacccaatcactgttcattgcagccactgagcttttagaaattatctgtgagttctttctgttctgtgctaacttaagagtcattttctttttttctttttttgagatagagtcttgctctatcgcccaggctggagtgcagtggcacgatctcggctcactggaacctctgcctcctgggtttgattctcctgcctcagccctcccgagtagctgggactacaggcgcccaccaccgtgcccggctaatgtttgtatttttagtagagacgggtttcaccatagtggccaggctggtctcaaactcctgacctcaagtaatctgccctcctcagcctcccaaagtgctgggattataggcgtgagccaccatgcctggccccaagaatcttttttttaattttatttatttatttatttatttatttatttatttatttatttatttattttgaaacagagtttctctctgtctccgggctggagtgcagtggcgcgatctcggctcactgcaagttctgcctcccgggttcgtgccattctcctgcctcagcctcctgagtagctgggactacaggtgctcaccaccacacccagctaattttttgtatttttagtagagatggggtttcaccgtgttagccagaatggtctcgatctcctgacctcgtggtccgcccacctcagcctcccaaagtgctgggattacaagcatgagccactgcgcccggccatcattttctaataagaggaataagacctcaggcccactgggtatcagggtttgggcttcgtgattttcctccatcatctctaatccctcacggcagctctgcccattttaaagatgaggaaactgagccccagagagacacgtggatgtgtgagtttcctgaggtgtctataacaaagtattacgggctgggagccctcaaacagcaggggttgattctctcacagttctggaggccagaagttgaaaatcaaggtgtgggcagggctgggtccctctggaggctctgagggagaatctgtcccaggcctctctcccgggttctggtggcttcagccatccttggagctctgggcttgtggccgcatcactctgccctctccctccgtcgtcacctggtcttctcccctgtgtgtgtccaatctcccttgcctttctctcatgggatcacctcatctcaaaatacttaccttcatgacatctgccaagaccccgtttccagataaagccacagtcacaggttctgggggtaaggacttagacatgtcttttttgggaagccacaagtcaacccactgcaggtagattccccaggccacaccgcagagagccaaagcctaacccggggtttgaacccggcctgagccccagccccccgttcaggctgcctctctgctctcccctctctcgcccgggctgcagaaagccggagatcagcacaactcgctgcatcgattggggattttttctcagctccccgaaaggagaagttgagctgttttgaggtttgagtgtcgctggatgcaccccctgacccccgccccccgcgagggttgcagcctcgctgtgtaatgctgaccaaaaaacaggaagggagcactgtggaaagccggttccaatcagctgatctgcccgccactgcagttaactgttgccatcacctttcaccaagtctaggggctgcagaagccatgagtctccccatcttccacatggcctctagcctcccagtgcaggcgcccgtcgacagcccaggggctgtggatagagcaccttacagcatcggccatggggtctcgccgcaaagcacacccagaacacgctcctctccctttgcccacagcctcagatccaccaggcactcgcctcggtgcccttctgagagcaggctgagtccagggggccaaaggctggggttcccttcatctgtcctgaactgtagcaagtgcagctggcagctggcagcgtgcatggggttttcattctgaaagcagaaataaaataaggatccttgcttgtcaggctgttgtcccaagggtccctggactccatggagcccctgtggcccggcccacagtgggacacggtgacagtgatgggctgcagggcgcagagggacgcccccagctggtggagccaagctcacccgaagttgtgccgatgcccaggacattccagtgagggactgaggaagggtcctgaacgtgccactgccccagacccccctcttggggcaaaggaacctaggactcgtacccacctggaccgggtcctgagctcctccttaggggccctacaaacccagtctcatgtttcccccaactcccccagcccctctgccatcagccaggccactagctctgttcccccacccacagtcagcactggggtaggtcacctagaccacagtgccattatccacttcgacctctgccctcaaggacacctgcctgggccacgtcctttccccctgagtctgtcgggcaagacacagttggatgccagcctccacccagcattgggggcgtcatctcatacgtcctcaccacatcctgatgtgggcagactgaccacccccacctgacatgtgaggaaactgaggcacacgagctgctcagcaagggtggcagagatagaagtttctggaaccaggtgtgtgtcaactctcatgcctctgaagttgaggttcctgtttaagagcttatggagatataatttacctatttacttatttataaatagataccttatatttatatctacagtttataaatatatagattaaattgtatctgcattttataaatgtataaattatatctgcagtttataaatctgtaaattaaattatatctgcagcctcaaattcctggcctcaagtgatcctcccacctcagcctctcaagcagctgagaatacaggtgcacaccaccacccctggctaatttttttattttttgtagagacagggttttgttatgtcaccaaggctggtctccaactcctggcctcaggcaaaagtgtgcaattcagtggcatttagtacactcgcagtggtatgcaaccgtcgcctctatgcagttccagaacatttccatccccctgaaaggagaccccgtccccatcagcattcactccccacttccctctcccaggccctggcagccactaacctgcttcctgtctctatggatctgcctgttctggacatttcagatcaatggaatctctcacactctgtggccttttgtgtctggcttctctcacttggtatcatgttcttgagattcatacacgtcgtagcatggatcagtgcttccttccttttcatggctgcatcatattccacggtatggatggaggatggaccataatttgtttctctgcccaccagttgtatcagcatttcattcctttgtatggctggtatgtggttggggttttcctggacccctgccccagccaggccaacctcccccatcagtgtcccccacaagaacaatgttggggagtggggggattgacactcacacagaggatcccctggagactgtcatgagccctgggaaggaggagagcagtcctctccagcaggctgcttcgggcgtgctaatggctggagccaccgagggacaccaggtgggaccaggagccggggtgggaggaagcaagaagggggcaggcgtgcccaggtatagcagggacgtccaggtacagcagggacatccatctgcacgttcttcccagcctgctgagaagccagtggccagagggaggctggcttcagggagcagggcggacgggccggctggcgggggccctggactcgggcaggagcgtttgcacgtggcttcccaagtgcgacagagagggagtcctgggagcaaccccagccgcggggatgtgccagatctgaggctgatagctgaggacggacaggtcccaagggaggaggagagggggtcagagatggctgcaggggaactgcccggaggccagtcctggtgaatttggtttggggtgcttcgttcaagcagctgatggggcatccaagggagaattgtgcaccagccacacaaagaatcccgcagccccagggctcatcaggcctcagaggccatcctgtcgcatgacccagtcagagaggggtcagggacagacagcaagctggggcacctcccagccaggcactcacccagcccttggctgttggccatacagggaggtgagtttgtcaggagaggtaagtgttgagagggggcgtgtggctcccctctcattggggggcatttcagggatgagattcagggcataggccacagaccggaggaggctcagggtcaggacggggccaaggcctcagaaggcagaagtcacccatgtcacgaggagcaaagggaagccagcatttgtttgaggaagagcaatacctgcagtcagcacccgtctgtctgtcaaagggtccaggagcccccactggcttgagttgtgtctatgttacatgaatgcagaggtatttgaggctgagggtctctgagaccacttgtcactttgctgggctgagggagaaggaaggtggggcgtcagtgggcagcagggtgggcagcaagcttgggctcaggagggtccggggcagcagcctggtgcacttcaaagggagattggaaggccagcgtgtccagggccgggttggggaagcagggccagggtcattgggtgcccgtcctcctctcgggtaggcgcactgctgtggtggggaaagaggaggcagaattagggctctcaggagtttcccccctgctcgccctgcgagcggtcaagactcaggctagcccaggccatccgaaaggctaaacagcgggatggttatccacacaaacatctaggtcacccatccacacaggcaggcgtgtgtggaagacagggtggtgcaaggacagaaggaggaggtacaatgtggccctgaccgcaagctactgaaggtccctgaggggggtgagctgggcaccccgggcaccacaggaagcgaagatagaatcaatctctggctgcctctcctgtgtggcctccccgggatgtttgcacaaaggtagggggaagcagtttttgggggccctgggtctgcagagcagcccagaggaggagataggagctggggcccgaatgcagggcaggcaggagacggggcagggcaaaccccagaggcgacgagaaagcagaataagccatcatatagggtcagttttagacctcacagtcagaaacccttggggacagaggccaggcttcctggtccaacccaagttcccaacccctgccctgttgatatgtgggctggatcattccgttatggccaggccatcctgtgcatcatgggggactgagcagcatcctgatccctgcccactagttgcccatagcacccccgcccctagtcccgacaaccagaaacgtctccagatgttgacaggtgttccctgaggagcagaaccaccccccagttgagaactgctgttttaggccaactgtatgacaagatagatttcattgtaacagatggtctctgcctaaatatttgtagattctttttttcttggtaacattgtgccattggagttacacatcaacccgaccaaattcggcacgattgtggagtggctgttgggcgtggcgggaagcagtttcagtccggcgttctccctcgtcccttgggggaggtgactggtgtgcctcctcacctctcactcattgcccacccagagcccaggggacggtcactgctcacccacgatcaggcatgtcctcgtgtcaccgatgatgaagcggccctaggtgcgtgaggatctggctttccaagagcctgctcttccaggtgcactgagtgacgtcttacaatgttgtttgtaagacttgctccccatgccaaaaaccgcagtccctgattttaggacttccgcctgcactgagaagtaacatgctccctgctggggttttttgcaaaggaatgtaatcaaagaggtttgccggttttctgatccaggagagtgctggtttgtgcgccctggattctgtggtcctccctgtcctcctggggtgacttcttgaaacctatgccaggtgctggctgtggctcaggtctcgctcctttaagcatctccccagcaggaaacaagtcaagaaccactgccgggaaacaggatcagcggccagagattccccactttggcagaaccatgacacgtttcattatctcttttggttcccccagttgcttttccccttttttttttttttttttaataaaacacttcgtctttttagtgtcttttcatttttcttaactttaaaaaaaattttttttagagacagggtctagccctgtcgcccaagctgaggtgcagtggtccagtcatagttcactgcagcctcaacctcctaggctcaagtgagcctcctgcctcagcctccaaattagctgggactacagccacgtgccaccacgccagcaaggtttcatttcctttggtatctaccaggggttggcaaactacagcccatgagttaaatctgccagtgcctatctctacaaataaagttttattggtgcataaccatgcccatgcatttacatatcatccctggcatctttggcaccatgagtgcagagccgagtaattgcacccgagacactgcatggcccacaaagctgaaaatatttactacctggccctttataggaattttttttcctttgtctaccccagtacatccaccgcttcgtagaatgttccagaaccccataaaggtgaccatttcacagatgcctttttttttttttttttgaaatggagtcttgcttggtcgcccaggctggagttcagtggtgcgatctcagttcactgcaacctccgcctcccgggttcaagcaattctcctgcttcagcctcccgagtagttggtattacaggcgcccaccacaacacctggctaatttttgtatttttagtagaaatggggattcaccatgttggcctggctggtctcaaactcctgacctcaagtgatccacccacctcgtcccccacaaagtgctgggattacaggtgtgagccactgcacccggcccccaggtgtcttcttatcttctgctcagctcccccttcccaaatgtaatgaaagcagctttccatcctagatccagacagcccagatcaccagctggaatctctgcatttgtatccgtgccatagacatacatacgtattcataaacatccatttccccacacagagtcataaagcagtttggggagtcaggaaaggaggacacagatagagatgtcccacagggttcggcggagctaactcactctgtctctctgccccacagctgggagtggtagtacagcccatgcatttgggacctggctaggctggcaggagctgtgcggggttccctccttgccttgaaccccctcacagggctgaacatcagcaggccccatctcttgaagggtttccagctgcctcctgggctctgagatcgcgtgcatcctgcctgcagggcgcacagtctgccagggactcagtgggaagaggatcatggaacctgtgggcccagagtcaccgagcaggaccctgtcatcctcctggtctctcacaccagcccccttcctcactgtagctgacagggcctgaccagaggtgcatgcccaaggccgcaaaccccctaggaggaagctggcatctggggtgtcagaagtgtgactaggagctcagagggtgtactggagcttgcagttgggggataattaagccagagggccacctcttttaagggagagtgaattatggcatgaggacaggcatcccggagtcaggcggctgggaacaaggcagtggtcattgtgacccggcagcattcccagccctggtgccttttccccagctctggagacaaaccagcaggcctgggtgttccccccacagagcacagagagcagcaggcgctgtgaggggcagcctgggtgggaaagagggaatggagggaggggtgcagaccgcagagaggccgctccaagctgaaaaatggggcacatcagccaaagttgtctttggtgggtatggagaggatgggggtgccctacagctgagtgctgaggctggaggctgcattgacccccaggtagaaggggcaccccaccgccacccccaaatccccaggtactccctcggcttcatttctgtgccctgccacataaaacaacacagccctgacgtttggaatgatctaaggctattttagacaaaaggggaagttatattttggggaatgctgcatctaagagaagagtgaaattatggggtatattttaagcaccataaaaaggtctccttggaatttggagaaagttgattaaaagctgaagtgtaaggtctgggacacccctgccacagccctgccctccccaaatgttctgggggttttactgctccagggttatggagacaggggacccatctgtctatcggcgatgtcagcctcaatgtttggggcgggagtgtgggcaggcatcaatcagccacagggcctggctgccaatttgtttcctagtgattatccaggatagatccgatttctgcaggcctcgccctgggcagctcagtccccaatgtcacagtgcagttgccacctaaggtttccttctgtgtgacttggccacagcaagccagaaccagctcctgaaaccagtcccctcgagaaccccattcccgggagtgcccagaggcagcttggcatcttctgcccagctgctgactggccctgtgaccccgacacgtggttcctcctggtaaaagaaagaaagggatgacttagcagtggtcaggcaccagcacccaacaccttccctagagggggttctctgtaaatcccggacagtatcatcacctctttaagggagagtgaattacggccacctctgtctttgtcagtgtcattacagtattctcagcccgatgcggtggctcacgcctgtaagcccagcacttttagaggccgaggcaggctgatcacttgaggtcaggagttggagaccagcctggccaacatggtgaaaccccatctctactaaaaatacaaaaattagccaagcgtggtggcaggcgcctgtaatcccagctactgaggaagctgaggcaggagaatggcttgaacccgggagtcagaagttgcagtgagccaagatcatgccactgcactccagcctgggtgacagagcgacactcttcctcaaaaaaaaaaaaaaaaaaaagaaaagacatatacaggattctagttagcgggtatgtgaactgaggttcttgcctggagctgattctgccatcggttgatgtttggcaactgctggagacatttttggttatcatagctggggagggagagatgctactggcttctggtgggtagaggccaagatgctgctaaacaccccacagtgtacaggacggcccccctctttaaagaatgacccggctgcaaatgtcagtagtgctgaggcagagagacctgctttagtttagaggcctttagagagtacaattgaaaatctggtctggcgctctggacagaatctgcagggagcagtggtaattcagaagccaccacctagatggaggccgggagccatggctcacgcctgtaatcccggcactttggcaggctgaggcaggaggatagcttgagcataggagttcgagaccagcatgacaacatagcgagagcctgtctctatattttttaaaattttttaaaatgaatttatttatttatttatttatttatttttatttttttgagacagagtttcactctgtcacccaggctggagtgtagtggtgcgatcttggctcactaaaacctccgcctcccaggttcaagtgattctcctgcctcagcctcccaaatagctgggactacaggcgtgcgccatcacgcccacctgatttttgtattttttggtagagacatggtttcgccatgttggccaggctggtcttaaactcctgacctcaggtgatccgcccaccttggcctcctgtgatcacgcctgggatcacaggcgtgagccaccatgccgggcctgtttttttaatttaaattttcttttaaatgaagccaccacctgtgtggagggagctgtttgtggaaggtgtaattgttaataagattgtcctccaaggaggatgagaagacgacaagggcaggcagcccctggagaggccctcagtgcaggccggcctgaggggacatctccagtcctgccaaagtgcctggacccgttctcggcacctctcacctctcccctacaaaccagaatttaccagctccaggagttcagaggaatggccaggaagcaagatgtgggggtttgagtgcaggcttggctgcctgcatgctgtgtgacctgcagcaagtcacttgacctctctgttctgcctcctgatctctcacgccccagggcctttgcatgtgctgtgccctcaatctggaatactcttgccaccatcatccttttaagtcccacccaaaggcctccatgtcccttcagtgccagcgcacagcaccactgggagattcagagcacagatccaggatgacgggcaagcatggggtgtggctcccactgccttgcaccctgaggctctgagcaggctctcttcagcgaccctgtgtttcttacagccggcttctggtgttggctgaggaagagccaggaatgagcgagtgctgagatggagtcacaggacactgaggcagcagggaggccgaggaggggagcctgggcggtcctcctatgcctgagtgcgctcccatccttactctggaactgccacgtaaagaaaagcagagatgccccgtggttcatacctgtaatcccagcacttcaggaggccgaggcaggaggatcatttgagctcaggagttttttgtttgtttgtttgttttgttttgtttttgttttttgacacagagtctcgttctgtcacccaggctggagtgcagtggcgcaatctcagctcactgcaggctccgcctcccgggttcatgccattcttctgcctcagcctcccaagtatctgggactacaggcaccaccaccatggccggctaattttttaattttagtagagatggggtttcaccatgttagtcaggatggtctcgatctcctaacctcatgatccacctgcctcggcctcccaaagtgcagggattacagctataagccattgcgcccggccaagctcgggagtttgaggtcatcctggacaacgtggcaaaaccccgttgctacgaaaaatacaaaaattagccaggcgtgctggcgcatgcctgtagtcccagctactcaggaggctgaggtgggaggattgcaggcccatgatatgtcaaaggcaggatgtgtaaaccaagatggaggtgatgaggagcagcttgtgcccaactgtcaggagcagcaagggtctttgtatcatatgatccctctgggctcagggcagtgcctgctgtggcttccccagacccaaggaggatgccacacagtataccattcagcgttggagtgagcgcccaagacaggctgggcagccaccgctactgccccttttcagagcagattggattcaaaggagattatttagccataaaaaggaatgaagggccattcaggctcacatctgtaatcccagtgctttgggaagccaaggcgggaagattgcttgaggccaggagtttgaaaccaccctgggcaacatagtgagaccccatctctacaaaaaataaaaatattagccaggcatgtgcctgtaaccccagctactcaggaggctgaggcaggaggatcgtttgagcctaggaggcagaggttatagttggtgagccatgatcatgccattgcattccagcctcggcaacagagcaagactctgtctcaaaaaaaaaaaaaaaaaaaaaaaagatagatagatagatatctaaatgtatatctcctttatgctaattggtaacagtcctcatggtgagtattgaataaactggctggagtgggtttgtggcggcagctcttggagtatatgttctggagagagagagagagatatataacagcagatatagagcagtttagtcctgacatggtggcacatgcctgtagttgcagataactcagaagactgaagcaggaggattgcaaagccctgggatttacaggcatgagccctcatacccggtctggggtttcttgttgttgtttttcaagacagagtctggctctatcgcccaggctggagtgcaatggtgtgatctcaactcactgcaacctccacctcccggactcaagcgatcctcccaccttagcctcccaagtagctgggactacaggcgtgcaccaccacacccagctaatttttgtatttttagtagagatggggttttgccatgttgtccagcctggtctcgaactcctggactcaagccatccacccatcttggcctcccaaaaggctgggattccagacgtcagccacggcgcctggcctgttgtttttaacacacccgcttacttgtacttggattgtcaactttttctcttcctcaccacagcccactgaagggacacagcagtggtcccacactggggttcgggagatgagggcaaactgaaatcttggtgattcagactttctttccccactaccataagtgagggaacccacacttacagcagatatgtattccaaatatatatatatatatatatccaagagctgccgccacaggatgacgggttgctgaccacagctctggagagtgggtccaaggggagcctgggggccccaaaaggcatcccccaccccaagtttacagagagaggcagtggcacctgcagggagggcagagaggtgctgtggtagctacagaccctccttccagccctccctaaggagattacctttctttacatgtgcaaatgttcacttttgccgcattaaaagtactggaagggcgcggtggctcacgccgataattccagcactatgggaggctgaggcggttggattgcttgaggtcaggagtttgagaccagcctgggaaacatggtaaaaccccatctctactaaaaatatgacaattggcccggcacagtgctgcgtgcctgtagttccagctactctggaggctgagccaggagaatcatttgagcccgggagttggaggttgtgttgagccaggatcgtgccactgcactccagcctgggcgacaggaatgcaaccctgtctcaaaaaaaaaaaaaagtactggaagtctttgctgttcaagtccctgtggtttggagattgtgtggggaagcaaacgtcatctcaagatgaaacctttccaaatgagctgaacacttgcagaatgagcctccactcagactcccctctcagcttagcctaaggctggctcctcccatgatgcaaatacggtgcaagctggttgcaaagtgaggttgagaatctttcttgcaaaagatgcattatttcaggaagccatcaaaagttgcctggaggctaggcgcagtggctcaggcctgtaatcccagcactttgggagtaagaggggggcagatcacctgaggtcaggagttcgagaccagcctggttaacatggtgaaacctcgtctctactaaaaatacaaaaattagctgggtgtggtggcatgcacctgtaatcccagctactcaggaggctgaggcaggagaattgcttgaacccgggagattgcacctctgcactccagcctgggcaacagagtgagactctgcctcaaaaaaacaggtgatctggagaatcactcccctcatacctccttaagtctacatggaacagtctcaaaaatcattcctacatcacagccaggtgtggtggcacatgcttgtaatccaagatgctcaggaggctgagacgggacgatcacttgagcccaggagtttgggacatagacacagacagccaatgacaggcaggtatcagttagcaggcaggaaagaggttcaaccatggtggacagagccttaggagctaatgaggccatgatgctggtaactttaaatgacatcattcagggccagttgcagtggctcatgcctgtaatcccaacactttgggaggccaaggcaggaagctcacttgaagccaggagttcaagaccagcctatacaacaaagcaaaaccctgtctctacaataattaaaaaattaaacaggcgtggtggtgcaaggtggtgctactcaagaggttgaggtgggagggccgcaggacccaggaattggaggctgaagtgagctacgatcacaccactgctctccagcctgggggacagagcaagatcctgtctcagtaaataaataataaataagtaaataaaatgaaaggattttcagcttggcttgcaagtatataaagcaagttctgttccttgctttatacacaagacacacctaaatcaaagggcttcaggaagttaaaaacaaaggggaaagcaagcacaggtgtaccaggcagtgagaaacgggagatagcagagctgcaattcggacatagttcaggcctctgcacattacatgtggcaaagattggttatgatgccaaaagcctcactttgcaataaaggtataacacttgtgaatatctatgcaccaaacaacatagccactgcctttatacagtagaaatttgtgtgtgtgtgtgtgtgtgtgtgtgtgtgtgtgtgatggagtttcactcttgtcacccaggctggagtgcggtggcatgatctcagctcactgcaacctccacctccctggttcaggcgattctcctgcctcaacctctgaaatagctgggattacaggcgcacgccatcacacctggctaatttttgtatttttagtagagacgggtcttgaactcaggtgatccgtctgtcacagcctcccaaagtactgggattacaggcatgagccaccacacctggccacaaagtaaaaattctaaaagatacaaggagaaacacacacacagcttggttgagtagatagaaaataggcaaggatgttaagacgcccaaaccacatgcttaaggcagacattgtggccatatcgtgaactcttaagagaataaacctccttacacatacatggaacattctcaaaaaatcatttttcttttttgagacagggtctcactttgtcacccaggctggagttcagtggtgcagtcttggcttactgcagcctcaatctcgtgggctcaagtgatcctcccacctcagcctcccaagcagctaggattacaggcacttaccaccatcaagtctggctaatttttgtattgtttgtagagacggggtctcactatgttgcccagggtggtctccaacttgtggcctcaagcaatccttccaccttggcctcccaaagtgctaggattactggtgtgagccaccacacctggactcaaaaatcatttctatatcagagtcaggtgtggtggtacacacttgtaatcccagctgttgaggaggctgaggtaggaggatcacttgagcccaagagttcaggaccagcctgggcaacatagcaagaccccatctctacaaataaaaatcattcctatgtcaggtaaagagaaagcatttagaacttcccagagtagaacaattacaagtgacactctaacaatgcaataaaacttcgtggaacttttttttaaagtaaacttatattgagcaactcttagatgaagagatacaaacacagctgggcgtgggggctcatgcctgtaatcccagcactttgggaggccaaggcgggcagatcacctgaggtcaggagttcgagctcagcctggccaacatggcaaaaccccgtctctactaaaaatacaaaaattagccgggcacctgtaatcccagctactcaggaggctgaggcaagagaattgctcaaatctgggaggcagaggttgcagtgagccgagatcgcgccactgcactccagcctgggcaacagagtgagactctgtctcaaaaaaaaaaaaaaaaaaaggtacaaacagaccaaaattgcaggttttctaaaaatcagtgacaaacacccgtatgttatcagaatccatgggctatatttaaagtgatggtaggaggacaccacatagctgaacacccattagatccacaaataggaaagaacggaagtaaatgaattcatgtcctatctcaagctgagaaaaaagaacaaagtaacccccaaagagaatgatttgggcatcaaatgggcaagatgaggccagctgcggtggctcacacctgtaatcccagcactttgggagaccaaggtgggcagatcagttgagcttaggagttcgagaccagcctgggcaacataatgaaaccccatctctaccaaaaatacaaaaacttagccgggcgtggtggcacatgcctgtggtcccagctacttggagggctgagggtggagaatcacttgagcctggaaggcagaggttgcagtgagccaagatcatgccactgcacactagcctgggcaacagagtaaaaccccatccccccccccccaaaaaaagggtaagatgagccctaggggaaatatgataaattcttcagatgttttcacagccttgagaaccaaacaggaccttcccccatcaaagcctggtttgttctgtattctttctgtgacctagtacgtggtttcgtgataacctaaacccaaatttagtgacatatgtaagatttcagtaacttgtttcacacttaggtttttgttgttatttaaggcttcccctaccccacccctgtagggtttgctgtgagactttagctcatggtaggagtctgtccttaaagggccacgtcctagccctgggagtccttgctgcgtttcagtgtttgctgtaatgccatctgcgtctgtggctgacagttggtgtctcttgtgaactgggacatacggcgttgggagcactcagctctctgtacatccctgccgtccgtccatctgaccagcaaccagctatcgagagcctgccggggtgccccaaaccccttgagcaaccagaaaagaacagaacccggcagcagctaggctaggggccctggagagcctccacttcctcctctgcgaataggggagccatgaggttggggtgactcttccacttcctgcccccacatccgcaggccaactgagcctgcagctgcctcctgtgcaggcttgggcttgggggtgtggggagtcctgtcttgcaccacatagctgcctcctcacctccatgacacccacccccttcgcagggtcttccttgtgcctggctggcatcatccccgacatggcccccactaacctcctcattccctcggccccgccttcaccacagctctgagctctgttgaaagcatcagctaaacttctcatttcctcgcctccagccctgcctgctggcctccgccccctctgctcccagctcccagggagtctcttctcacccagccctccttgggcacgtgaccctgtggacccattttgtcctgggtgcttcccaggcctgctcctccacgtccccaccatggcctcgggagaccagtcacccagggtgacactcacctcctgccgacccatcctgctggaaccatgtcggggatccccggaaaaccccatttaacagaggatccagaacagcggcccctggccactcttttctcacgaaaaccagacagtctgtatttcacacagatcctaggggccacccagtctctgtcagaatggcttgactctgctattgtaactcaaatgcagccttaagccagacccagaccgatgtggctgtgtgccaggaaaacgtcatttgctgctgctgaaaattgaatttcacatcaatttcagccatcaagagatcttttgacttttttttttctttttttttttttttgagacggagtctcgccctgttgcccaggctggaatgcagtggtgcgatctcagctcactgcagcctcctcctcccgggttcaagcgatttcctgcctcagcctcccaagtagctgggactacaggcgcccaccaccatgcccggctaatttttgtgcttttaatagagacggggtttcaccatattggccaggctggtctcgaactcctgaccttgtgatccacccccacccccacccccaccccccacccccggccttccaaagtgctggaattacaggcatgagccaccacacccacccgatcttttgacattttttctcccctaagcattttttttttttttttcagatggagtctcactctgtcgcccaggctggagtgcagtggcacaatcttggatcactgcaacctttgcctcccaggttcaagcgattctcctgccacagcctcccaagtaactgggactacaggtgcacaccaccacgcccggctaatttcatttgtagtttggtagagatggggtttcaccatgttggccaggctggtctcaaacttgtgacccacccccctcggccttccaaagtgctggaattacaggcatgatccaccatgcccggccaattttttgactttttttctcccctaagcattttttttttccagttggaatcttgccctgtcgcccaggctggagtgcagtggcgcaatcttggctcactgcaaccttcgcctcccaggttcaagcgattctcctgcctcagcctcccgagtagctaggactacaggtgcccaccaccacacccggctaatttcttttgtattttggtagagacggagtttcaccatgttggccaggctggtcatgaactcctgacctcaagtgatccgccctccttggcctcccaaaatgctgggattatatgtgtgagccaccatacccagccccctaagcatttttaaaatgtgaaaactgtccctagaacgtaggctgtacagtaataggtggctggccacactttgcagacccccggtagagatcactggtaccaggagggtgtcctccatgtggccacacccatgcccctacctgtttgtctgtgaccgctttcctgccacattggcagagctgagcggtgacagcagatggagccaaaaatattcaccacctgccccttcgcagaacaagtttactggcccctgattcacacagaaaatcccgcttaatcctccatctgctaaggcagagatttttccaaaaccttaccttacaggagagaaatctgaaatccaagagccgtgaactaatttgcccaaattgcccagcagtagccttgaacctccaaccctccccctggccaccaggatccactgaatcttgcaaagtgtctcagcagaagtagcctgcaacctggctagtcatggtggctcaagcctgtaatcccagctttttgggaggccgaggcaggagaatcacttgagcccaggagttcaaggccaccctgggcaacatagcaagaccctatctatactgaaaaaaaaaaatttttttttttaaatttagcaaggcacagtggtatgcgccggtggtcccagctacttgagagtctgaggcgggaggatcgcttaagcccaggagtttgaggctgcagtgagctaggatcacaccactgtactctagcctgggtgacaaagcaagaccttgtctcactaaaagaaatagcctgcagccccatgaggacctgggggtttatttccctggcatttccgtgaagcacagccccagctcccagtggctgccccatggctgtttgcttggcagacctggcagagcagaaccccccggtccctcaggcgtcctgggacagggcactgcccatagggctcctgtgtccatgagggcctggcacagccttgggatgtggcctccgcctaccggcttgagccaccggcgctcagggtcacagctctcgtctgggtctgactgctgtcagtgtccccaggtgggcgtcacctactccgtggcctcgggacgagtgctgtttcaggtagaaagttctgctaggaacttggagaatacaggaaagaaataacaggaggtccaagctggctgccaggccctggccagtgtcatgtggtggtctccaccttacccagctagaaggagagaggacttttgcaaaccaaaaagcaaggggacaatctccctctttcagcccctttctttaggctctgtggtggctcgatatttgcagatgttctttctccagccgcagcctctcttggccataccggtcactccttcatctcagtgcctgcatggccttgacgggacaggggagatcagaagttctgcgtggctcatggcctgagcaggggggtggaggcttcacccagaggtggtgttgcagagggaggaagaaacagcatcaagggaccgggcatggtggctcacacctgcgatcccagcacttttgggaggctgaggcaggtggattgcctgagctcaggagttcgagaccagcctggccaacgaggtgaaaccctgtctctactacaaatacaataaaattagctgggcttggtggcgggctcctgtagttgcagctactctggaggctgagacaggagaatcactcgagcccgggaggtggaggctgcagtgagccaagatcgtgccactgcactccagcttgggcgacagagcgagacagtttcaacaacaacaacaacaacaacaaaaagaaacagcatcaaggctccgggaagtgagcagcccactctgtccaggcaggtccagggaggctcccagaggccaagacacctgagctgtggctaaacgtaaccaaacgtgtcagggcaggtgggcagggcatgggccaggaggggagccacggacgcgtcagcctcctgctcttggacttgagggagggcggcagacctttcagcacttctgtttcctcgtctgaaatggggatggcaggtctgcttcttaaaggaatgcgagttgaagagggagtctcgaatcccacagtatatgcccctagtgggccactcctcaccacaggtcatgatatgtcatagtctctgttctccctaaaatgttttagggagaatggtttttttggttttttggtttgtttgtttgtttttagatgggttctaactctgttgcccaggctggagtgcagtggtgcaatcatagctcactgtagcctcgacctcctggactcaagcaatccctctccctcagcctcctaagtagctgggactacaagtgtgtaccaccagacctggtgaacttttcagttatttttctttaagagacagagtcttgctatgttgcccagctggtcctgaatccatggcctcaagcgatcctcctgccttggcctcccaaagtgcttggatcatagatgtgagccacctgcctggcctccctaaaatgttaccaggcattccaaccaagaggagagccatcctttagatagaagatatagaatttttgaccaggcacagtggctcacacctgtaatcccagcactttgggaggctgaggcgggtgaatcacttgaggactggagttcgagaccagcctggccaacatagcaagaccccatctctactaccagtacagaaattagccgggcattggccgggcacggtggctcacgcctgtaatcccagcactttgggaggccgaggcaggcggatcacgaggtcaggagatcgtagaccatcctggctaacacagtgaaaccctgtctctactaaaaaaaatacaaaaaattagccgggcgtggtggtgggcgcctgtagtcccagctactcgggaggctgaggcaggagaatggcgtgaacccaggaggcggagcttggagtgagccgagatcgtgccactgcactccagcctgggtgacagagcgagactccgtctcaaaaaaaaaaaaaaattaaccaggcatggtggtgcacacctgtactccccactactcaggaggctgaggcaggaggatcgcttgaacctggggggcggaggttgcagtgagccactgcattctggcctgggtgacagagcaagacttggtctcaaaaaaaaaaaaaaaatctagaatttttgcctacataggacgttcaaccctggatgtctcttttcacagattctctgtttgactgaacattagactcctgaaccttgtcccagtcccatctgtgcacttctttataaaatccagtttcagctgagaccctgctaagtcagtttaacaggaaccctctgcccttgagagctgatcacccttgatgtctgatcgggctctgtatcttcccccataccccaggtactatctgatcaccctggcctgtcttcagcaagaatcctgttaggtcggtttagctagaaactgctgtatgctcagtgtttcctcttagtaattttccatccactgacccccaccctgctccttggttataaagtcccgcttgcccaagccatattcagatttgagcccaatcattctcccccactggaaggccccatcacagtagtgggaataaaggcatcctgcccatgtgttaatgagtaccattgaataatccttttttgagacggagtctcgctctgtcacccaggctggagtgcagtggcatgatctcggcacactgcaaccgctgcctcccgcattcaagcgattcttctgcctcagcttcccaagtagctgggactacaggcgcacgccaccatgcccggctaatttttgtatttttcgtagagacagggtttcaccgtgttggccaggctggtcttgaactcctgacctcaggtgatctgcccgcctcagcctcccaaagtgctgggattacaggcgtgagccactgtgcctggccctattgaataattcttctctaactttctcaattcaagaaacctttttaaattgcccagaagaaaaatctcaaaggcaggggcgtttggaaggcggccagacttcttccagccctcaatgtccctggtgggcacatggcatccccactgggcccacacctaggccagccctgtcagaggaagaggcaagactgcctctacgttagttttacctagaaaccgtgactggggggaagctgaattatgaccaatagctttatggatttctttcttctgtgcttttcacgaggtttttaaaatttttctttaatttttttggggggtggggcggggaacagggtctcactctgtcgtctaggctagagtgtaatggcacaatcatggctcactgcagcctcaacctcctgggctcaagtgatcctcccatttcagccccctgagtagctgggactagaggcatgcatcaccacgcctggctatttttttcttttttgtagacacaggatctcacggctgctcttgaacttcctgggctcaagtgatctcctgccttggcctcccaaattgctgggattacagttgtgagccactgtgcctggcttattttatttctttttttttttttttttttttttttgagacagagtcttgctctgtcacccaggctggagtgcagtggtgcaatcttgactcactgcaacctccacctcctgggttcaagcaattctcttgcctcagcctcccaagtaggagggactacaggcttgtgccaccacgcccggctaatttttgttatttgtagtagagacggggttccaccatgttggccaggctggtcttgaacccctgacctcaagtgatccatccaccttggcttccaaagtggtggaattacaggtgtgaacgacagtgccaggccttattttatttcttatttatttatttatttattattattatttttttttttttttttttttgagacagagtctcgctctgtcgcccaggctgaagtgcagtggcgcaatctcggctcactgcaagctccacctcccaggttcgtgccattctcctgcctcaacctcccgagtagctgggactacaggcgccaccaccacgcccagctaatttttgtatttttagtagagatggggttttaccatgttggccaggctggtcttgaactcctgacctcaagtgatccacccaccttggcttccgaagtggtggaattacaggtgtgagccacagcgccaggccttattttatttcttttttatttatttatttatttatttttgagacggagtctcgctctgtcaccaggctggagtgcagtggcatgatctcggctcactgcaagctccacctcccaggttcgtgccattcccctgcctcaacctcccgagtagctggaactacaggcgccgccaccacgcccggctaattttttgtatttttggtagagacagggtttcaccatgatagccaggatggtctcgatgtcctgaccttgtgatccgcctgtctcagcctcccaaagtgctggcattacaggcgtgagccactgcgcccggcctattttatttctaattgatgaaagttgtatatattcatgatgtgcaacatgacattttgaaatacgtatacattgtggaaagggtcaatggagctaattaacgtacgcgttacctgacatactcaacatgttttgtgatgaaaacacttaaaatcttctctcttaggaattttcaaaatacaaaaatatttacagtcaccatgttatacaatagatcgcttgaatttattcctcctctctaattgaaatttatatcctttgaccagcatctccccaaccctgccgccacccccggtaaccagtattctactttctacttccgtttttttgagacagggtctcgctctgtcacccaggctggagtgcagtggtgcaatcacagttcactgcagcctcaacttcctgggcctaagcgatccttctgcctcagcctcctgagtatctaggacaacaggtgtgtcccaccacacctagctttttattttttgtaaagatggggtgtcactatgttgcccaggctggtctcaaactcctggcctcaagcgatcctcccatctctgcctcccaaagtgctgggggattataggcatcagccacagcaccagccctactttcctacttcttttttttctgaggcggaggtctcgctctgtcacccaggctggagtgcagtggcaccatctcggctcactgcaagctccgcctcccaggttcacaccattctcctgcctcagcctcccgagtagctgagactataggcacccgccaccacgcccggctaatttttttgtatttttagtagagacggggtttcaccgtgttagccaggatgatctcgatctcctgacctcatgatctgcccgcctcggcctcccaaagtgctgggattacaggcgtgagccaccatgcctggcctgctttctacttctgtgagtttttttttggactgggggtacatgtgtagtttgttacagggatatattgggtaatggttagggttgggcttctaaaatacccatcactcaaatagtgaacactgtatccaataggtaacttttcaaccctcactcccttcctcccctttcccactatgagttcaacttttaaaaattctacacgagtgagatcatgcagtatttgcctttctgtgcctggcttattaacatagtatccctcagcttcatccatgttgttgcaaatgacaggatctctttgttttttttttcgttttgtttgttttttttttttttttttttttttttttgagacagactctcgctctgtcacccaggccagagtgcagtggtgcgatctcagctcagtgcaacctctgcctctcggtttcaagcgattttcgtgtctcagcctcccctgtagctgggattataggagcccaccaacatgcccagctgatttttctgttctagtagagatgagattttaccacgttaaccaggttggtgtcgaactgacctcaagtgatctgcccaccttggcctcccaaagtgctggaattacaggtgtgagccaccatgctcagccaggatctccttttttatggccaaatactattccatagtgtatataaaccacagtttctttatccattcatctgtggggttttttgttttttttcgagacggagtcttgctttgttgctcaggtcggagtgcagtagcacgatctcggctcactgcaacctccacctcctgggttcagacgattctcctgcctcagcctcccaggtagttgggattacaggcatgcaccaccacacccggctaatttttgtatttttagtagagacggggtttcgccatgttggccaggctggtctcgaactcctgacctcaagtgatctgcccaccccggcctcccaaagtgctaggattacaggagtgagccactgaacccagcctattcattcatctgttgatgcacacgtcttggctattgtgattagtgctgaaatgaacgtgagaatgcaagcatttcttccacgtactgatgtcatttcctttggatatatacccagaagtgggattgctagacctagtgagataataatttttttccaaagtttacaacttatattagaaacatgttttttatattataaaagaaaaaaaaatgtgtttctgttaaaggagaggcgttttttggttttgagtgagtccagcgctgtgggttttatagcctggggggaccatggcatccgccttcccggtgcgtgtgccagattatatcgcatagttgttgacaccggggtcccacttcctcccttctgtccaccctggaccccacatgatactccaggcacaccagccacccttgtgctttgagaccgtgcgagcccccggccagcccagccaagcagcaacacaatagcacccctcgctgcgagcgctgggccgcacttccccctcggatgtataatagcaccaaccggatatttttagatgggctttgaaaagtcgcagtgtgctgagaccgcataccagacgcgtgaggtcaccgggcctgggagcagcctctatgcatggataattggtgcacggggtaatcgggtaatcgcagaaccagaaagccagcccttgggcagccatggtggtgggaggggcccctcatatcccaaggcgttccctgtgttacgttcccaagacaccaggcctggctgtgatattagaagtcactgcagagacttgtcccctgggtttaaagtgagcactgtggctctttaaggtacaaatgtacatttctggggcacctctgccacagaccaggctttacaccaaggtactacggggaccctgactcagagagagacccgtttcctgctgcagacaccccagggccaccaacaggactgtcccccccaccccacccctgaggacaggcatccctttgccatctgctcatagttaagcagggaagctttctgagccccttcctgggacgttattttagggtttccctgacagatctctttgaattgagggtgactggggaggagagtctggtcgtgggaccacataggtgaggctgggcttcgtgctgtcaggcagggagcaaggaggagggcctaggcccaggcaccgggccccaggctgaagctgatttcctgcgtgagctccagactatggccctgcagggtcccgtgagcatccaaggagacgagtcagtgcctcgagactgggggtttcactccaaataacaacaaaaaacagttctccagctaccctctggagagctggaaatgaaacctagaaagaccgcagggacccctcagcacctagaatgcagcacatatgggaacctatggaagggacaaagggaccagtgagccccgactacccagccctgcaaccccttttatttctgtctgtgtacatcaatgctccgcagccggggtgatttgccgatctctggggacattctttggttatcccagatggcatcgggtaggtggaggccagggacgctgttcaacaccgtgtagtgcacaggacgcccccatcacacaggatggttcaccctcaaaaagtcccataggcacccaggaaagtcaacttcaccagcagagcccttggtggttcccgcccaccgaccagccccctgggtttcatcagaccctccagagactgtttcaaagttcaacaggtcagaccgggcccagtggctcacacctgtaatctcagcactttgggaggctgagatggaaggattgcttgagtccaggagccccagaccaacctgggtaacacagtaagattcgtgtcgacaaaaataatttttaaaattaggccaggcacagaggctcacgcctgtaatcccagcactttgggaagccgaggcgggcagatcacctgaggtcagaagttcaagaccagcctgaccaacatggagaaaccccgtctctacttaaaatacaaaattagccggggtgatggcgcgtgcctataatcccagctactcgggaggctgaggcaggagaattgcttgaacccaggaggcagaagttgcagtgagccaagattgtgccattgcactccagcctgggcaacaagagcaaactgtctcaaaaaaaaaaaaaaaaaagccaggtgcggtgatacatacctgtggtctcagctccttaagagacagaaatgggaggatcgcctgagcctgggggttgaggttgaggctgcagtgagctatggtcgcaccacttaaactccagtctgggcgacagagtgagaccctgtctccctgtctcaaacaacaacaacaacaacaagaggtgagcaaggctcatgtggtgacccagtccgcccccaccaaaagcacccggctacttcccagacccccttctctgtagaggaccaggtcatctctctctggggccccctccttatcaccttcctgcttggctccgtgccccatgatcttgagctcctccctgtttccttgtcccatgacccaaacagccagctccttgagtagtgtgacccgcacatgggtccagccacagcaactgtccgggcttcaagctctgcccgaggctttgcagctgaatggagccttctccaagggagtatctgggcctcccatggtcagatcctttttttttatttgaaacagagtctcgctctgtcgccgaggctggagtgcaggggcgcaaatgcagctgcagcctcaacctcctgggctgaagcaatcctcccacctcagcctccaaagtaactggaactacaggcacccaccaccatacctggctttttttttttttaatactttaagttctgggatacatgtgcagaacgtgcagtttcgttacataggtatacacatgccatggtggtttgctgcacccatcaacccgtcacctacattaggtatttctcctaatgttatccctctcctagccccctaccccctacaggccctggtgtgtgatgttcccctccctgtgtccatgtgttctcattgttcaactcccatttatgagtgagaacatgtggtgtttggttttctgatcttgtgatagtttggtgagaatgatggtttccagcttcatccatgtccctgcaaaggacatgaactcatccttttttatggctgcatagtattccatagtgtatatgtgccacattttcttaatccagtctatcactgatggacatttgggttggttctgagtctttgctattgtgaatagtgccgcagtaaacatacgtgtgcatgtatctctatcgcagaatgatttataatcctttgggtatatgcccagtaaagggattgctgcatacctggctaattttttaaattttttctagatttggggtttcgccatgttgcccaggctggtcttgaactcctggcctcaagccatcctcctgccttggcctcccaaaatgctgagattacaggcgtgaccactgcgcccagccactcagttgcatttttaatgggacttccccattcaggctgccccacaaaagcctccactcagtggtcagccagtgtcttaatctgttcgggctactgtcacagaatatggttacgcattgcttaactatgggagaaatgcgtcattgggtgatattgtggtcacatgaacatcctagaatgaacttacacaaacctagatgatataacctactacacacttcggctgtaggtgtttagtaggttatatactactaataggtgtgttaatatgtaaccactaataggctatacctatacaaatagatgtagctggccaggtgcggtggctcacgcctgtaatctcagcactttgggaggccaaggcaggtggatcatctgaggtcaggagttcaagaccagcctggccccgaactctggtgaaaccctgtctctatttgaaaatgcaaaaattagtcgggcatggtggctcgcgcctgtagtcccagttactctggaggctgaggcaggaggatagcctgaacctgggaggtggaggttgcagtgagctgagattatgccactgcactccagcctgggcaacagagtgagactcgatctcaaaaaaagcaaaaacaaataggtataacccattacttctaggctacaaacctgtacagcatgttactgtactgaatactgtgggcagttgtaacacaatggtaaatatttgtgtatctaaacataggccaggcctggtggctcattcctgtaatcctagcactttgcaaggcctaggcaggaaaatcgcttgaactcaggaggtcgaggccgcagtgagccaagatcacaccaccgcactccagcctgggcgacagaccaaaattctgtctctaaatagatagataggctggttactttggctcacacctgtaatctcaacactttgagaggccaaagtatgcagattgcttgagcccaggagtttgagactggcctgggcaacacagtgaaacctcttctctacaagaaaataagccaggtgtgctgacacgtgcctgtagtctcagctacctgggagcttgaggcgggaggatcaccttgagctctggaggttgaggctgcagtgagccatgatcatgccactgcactctagcctgggcgacagagtgagaccctgtctcaaaaaaacattggatgaatggggctgggcacattggctcaggactgtgatctcagcactttgggaggccaaggcaggcggatcacctgaggttgggagttcgagaccagcctgaccaacatggagaaaccccgtctctactaaaaatacaaaattagccgggtgtggtggtgcatgcctgtaatcccagctattcgggatgctgaggcaggggaatcacttgagcccgggaggaggaggttgtggtgagctgagatcgcgccattgcaccccagcctgggcaacaagagtgaaactctgtctcaaaaaaaaaagaaaaaatgattggatggatggatggatgggtggatggatggatgcatggatggaaacatagaagcagtacagtaagagtacagtattataatcttatgggaccaccgtcatatatgtggtccatcgttgatggtcattgctgtgcagtgcatgactgtaccatgtagaccaggtggctgaaacaacaaatatattctcacagttctgaaagtgagaagttcaaggtcaaggctctggcagatttggtgtcaggtgaaggccctcttcttggttcattgatggtgttttttcccatgtcctcacacggtggaaggagtgagggtgctctctggggttctcttctataagggcactaatcccattcatgagggccccatgtaagtgacctcatcacctcccaaagacctcacctcctcaacctatcaccttagggttagatttcttttttttttttgagatggagttcactcttattgcccaggctggagtgcaatggcacgatctcggctcaccgcaacctccgcctcccgggttcaagcgcttctcctgcctcagcctcctgagtagctgggattacaggcatgtaccaccatgcccggctaattttgtatttttagtagagacagggtttctccatattggtcaggctggtctcaaactcctgacctcaggtgatccgcctgcctcggcctcccaaagtgctgggattacaggcgtgagccaccgtgcccggccagggttagatttcaacatataaagtttgtcgggggccaggcatggtgactcaagcctgtaatcccagcactttgggaggccgaggcaaggagatcacttggggtcaggagttcgagaccagcctggccaacatggtaaaaccccatctctactaaaaataccaaaaattagccgagcgcagtggcacacacctgtaatcccagctactcaggaggctgaagcacgagaatcacttgaacccaggaggtggaggttgcagtgagccgagatcacaccattgcactccagcctgggcaacagagcaagaccctgtctcagaaaaaaaaaaaaaaattgtgtgagggacacagacatgaagtccataacaaccagtatccatccccctgtggaatgaggccttcaggaagatcctgtctctctgtgtcattgtgtctccggtttccgcctccctggtgtgcttggccaccacctaccccaccccctacaatgggaccttggcaatggccttgccacttccttcacactgtggcctcgctctctcctatcccctgggtggcccagcctctcaaatgggagcatcactgctgccaaactttccacgtgtgactgcagggcgtgccccctgcccctgtgccctccccttgccatgttacctcttccccaaacctagcggtcacaaggactgggacagtggaacaccaggccccaggaccagctctgctgcctctctctcatctacaaggccttacagcccgcatcctgctggcctcaccccatcttctttttcctaaacgaaagagcccccaccttccgccagccaccacctcttctcagcttctctgtcctgccccaggcaccttccctgcctcaagttcccccaggggctccgtcttaaccactctggagcagtaagtccctcatgggaagggggcaccccaggaatctggacagagtgtaggtgtcccccatcttcatccaggtgatggttacatggaaggccccagaggggacccctgcacactccctgcactgcacacacttccctgtatgtgtggactcctcagtacagagcaaaaagattgtcctgtgaaaaaggaatgaaacattgattacaggtgagccaccgtgcctgtcatcacagccctttcggaggccgagttggaaggatcgcttgaggccgggagttcaagaccagcctgggcaacttagagagatgcggtctctacaaaaaattttaaaaattagccaagcatggtggcatgcacctgtggtcccagctatttgggaggctgaggcaggaggattgcttgaggccacgaggtcgaggcttgcagtgagctatgattacaccactgggcgacagcaagaccctgccttttaaaaaaaaaaaaagaaagaaaaaagaagcggcaaccagacacaacaggccataagtgtatgacctcattgacctgagatacccagaacaggcaaatccatagagacaggaagcagattggtggttgtcagggactaggggagggaaatggggagggactgctgatggggacagtctccttttcgggggatcagaatgttctggaaccaggtaaaggcgatggctgcacaacattgtgaatgtactgaatgccactgaattgtacactttaagaaggttaattgtatgtcatgttttacgccaatttttttttaattgctctgtgaacccacttatcttcccaccaaactttagggctcctcaagggaccttccacataccctgccttgtgtccagcagtgagcccagaatccagatcagcccaaaactcctgccacaaagagcccgataggcaatatttgcaccttcgcagactagatggtagtctctgttgcaacacaattgaatgagcctggcatgtaccgataaaacttcattgatggacgctgaaatgtgaagaggtttttcacgtcagggaatattcttctttgggtttttgtttgtttgtttgttccttgtttcaccatttacaaatgtgaaaaccattcttggctcgcaggcgattaaaaaaacaagcatcagaccagatttggcccacagggtgtggcttaccctatcagatgaatggttacaactgaaaagaattcaggcaattgccatttttaatgtcagagacttaaaacttgaacaccggccaggcatgatggctcatgcctgtaatcccagtactttgggaggccaaggcgggcagatcacctgaggtcaggagttcgagaccagcctggacaacatgggaaaaccccgtctctactaaaaatgtaaaagttagccaggcgtggtggtgcacacctgtaatcccagctacccgggaaggtgaggcacgagaatcgcttgaacccgggaggtggagattgccgtgagctgagatcgtgccattgtaccccagcctggcaacagaacaagactctgtttcaaaaaaaaaacaaacaaacttgagcaccacacacaacctcagacacagagataaagagtgaaatgttggaatgggccttggctatacacctctgtatttttcaggtcttatctgggcttctaagtgacttatagcctactgtcttggggacaagtgagtgtcctcaaagccgagaaggagggaggcccagggctccaggctgaggcctatagaagctccatcctcgctggagcccattatccttagcaaactaacacaggaacagaacacctaatattgcatgttctcactttcaagtgggagctaaatggtgagaacacatggacacacagaggggaagagcagacagtggggcctcctggagggtgggaggagggagaggagcagaaaaaatactattggggccaggcacagtggctcacgcctgtaaatcccagcactttgagaggccggggcgggcagatcatgaggtcaagagatcgagaccatcctagccaacgtggtgaaaccccgtctctactacaaatacaaaaattagctgggcatggtggcacacgcctgtattcccagctatttgggaggctgaggcaggagaatcgcttgaacctgggaggtggaggttgcagtgagccgagatcgtgccactgcaccccagcctgggcaacagggcaagactctgtctcaaaataaaaaagaaaagaaaaagaaaaataactgttggatactaggcttagtacctgggtgacaaaataatctgtacagcaaatccctgtgatacaagtttacctacttaacaaacctgcgtgtgtaccccaaaaccttaaaagttaaggctaggcatggtggtgcatgcctgtggtcgcagctacttgggaggctgaggcagaaggatcccttgagcctgggagacagaagttgcagtgagctgagatcatgccactacactccagcctgggcaacagagcgagaccccatctcaaaaataatattaaaaggttaaaaaataaagtttatttagacaacagataaaatgatgtttttgcaaattatgtcacaatctggaaaatattaattaaataaaccgagtctgggcatgatggttcatgcctgtaattccagcactttgggagaccgaggcgggtggatcacttaagctcaggagttccagaccagcctgggcaacatggcaaaaccccatctctacaaaaaattagccaggcgtggtggtgcatgcctgtggtcccagctgctcaggaggctgagacaggcggatcgcttcagcctgggaggcagaggttgcattgagccaagatcgcaacactgcactccagcctgggtgacattgtgtgaccctgtctcaaacaaaaaaaaaaagagtgaaagaaaatgggctactctctgcttactgggtagccctactttgcaggaacagttaaagaaaaaataagagaccaggggtggtggctcatgcctataatcccagcactttgggaggccaaggtgggcggattgtctgagctcaggagttcgagaccagactgggcaacacagtgaaaccccgtctgtactaaaaatacaaaaaattggccaggcgtggcagcgtgcgcctgtaatcccagccactcgggaggctgagccaggagaaccgcttgaactcgggagacagtgcttgcagtgagctgagattgcgcccctgcactccagccaaggcaacagagcgagacttcatctcaaaaaaaaaaaaaaaaaaaaaagaaaaagaaaaaatagagactgggcacagtgactcatgcactttgggaggctgaggcgggcagattgcctgaactcaggagttctacgtcagcctggacaacatggtgaaaccccgtctctactaaaatacaaaaattagccagcatggtagcgcacatctgtagtcccagctactcaggaggctgaggcatgagaattgcttgaacccgggaggcagaggttgcagtgagccaagattgtgccacttcactccagcccaggtgacagaacaagactgtctccaagagaaaaaatagataaattgaacaatacaaaatataaaagcacagtgtaaaatgagaggaaaaaaaagaaaaagaaattccaccctcctgatctgaaacctgcttttgatttccttgcaggcttttggaaatgccaagacagcccacaacaacaactccagccggtttgggaaattcatccaagtcagctacctagagagtggcatcgtgagagggtgaggtgtccctggggtccccactggtgggagctggccccacgcactgttgcttcctgacacacacatgggagtgagatgtggagatcatggctgtgtggatgtttatgctttgtatgggagagcgagtgtgatttttaggtctttgaggtgaaggtctggaacagtaggttgaagtaggaaatgtgggcaggggctgggggacgtggctagaggtagtgggctttaccgagaacaggcaaggacagcccagcccatttcctgtcttgataaagtttctaatttggtaggtcttgggggtgtcacaggcagtggggatgcggactctggcctttgccaaacatgtgctcctttagccagaaaatgacaggtacagagctgcaaagtgaggtggtcgtgcatggaaatactgaagggtgggtgggtggatggactcatgaggggatggatggatggatggatgatggatggatggatggatggatggatggttagagagacagatggattcatgggtgaatggatttgcacgtagatggatagacagatttatggatggatggatggatgaattcatgcatggatggctgaatggatggatagatgaattattgggtgaatggattcatgagtggatggatgaatagattcatgaatgggtgggtggatagatggatggatggatggatggatggatggatggatggatggatggatggatcgatggattgattcatgggggagtagattcatgggtggatggatgcattcatgagtggatctacccatacactcatgaatccatccatcacaggtggatgggtagattcatgggtaggtgaatgaataaatgggtagattcatataatgaatgggtggatggatagattcatggatggatggatggatggatgggtgggtggatggatttatgggtgagtggattcacaggtggctggatagatggattcttgggtggatggatttacaagtgaatggatagaatcataggtaggtggacgaataaatgagtagatttgtgggtgtgtggatgggtggatggatggatagatagatggattcatgggtggatggattcatggatggagagatacatggattattcatagatggatgagtagattcatgggtaggtggatgaataaatgggtagattttgtggatgtgtcaattagcgaatggatagattcatgggtaaattggatggaattggatgggcttgatcagtggatccatggatccattgatgggtggatgagtacttagatggcatctgagagggtccaaggcctggatactcacagggatcccccactaactatagattctcatgtgaggggctgctgtgtcaatgggatttgtaaaggtcccaggattttgtctgtctgaacctgactgatgatcatttcaactgatggttcatattcaagatacaaacaggcatattgttctcctgaaccttccgcctctagcttcatttctttttcccagtgcccaggctccagtaggcagtggtgtgggtgagtggcccttgacaaatgtcaggggctgctctggcccctcggcctcagcccccacaaggcagtcagtggccccccaactcctaccacctgcccacatgggtgtacccggttcatcagaaacacctggaacagccacttgtcccacctgtcttccaggccctgacctctccatgaagaccccacctttttcacttcatattttgggggttaaaatacacaacataaggccaggcgtggtggctcacacctataatcccagcactttgggaggccgaggtgggtggatcacctgaagtcgggagttcaagaccagcctgtccaacgtggtgaaaccgccatctctactaaaaatacaaaaattagctgggcatgatggcaggcgcctgtaatcccagctactcaggaggctgaagcaggagaatcgcttgaacccaggaggcggagattgcagtgagccaagatcaggccactgcactccagcctgggtgacgagcgaaagtccatctcaaaaaaaaaaaaaaaaaaacccaacaaccaaccaaccaaacaagcaaacaaaattagctgggcgtggtggtgcatgcctgtgatccagaaattacaagtgtgagccactgcgcccagacactatgtttaattttttttttttttttttttttttttttttgagacagagtttcgctcttattgcccaggctggagtacaatggcgtgatctcggctcaccgcaacctctgtctcctgggttcaagcgattctcctgcctcagctcgagtagctgggattacaggcatgcgccaccacacctggctaattttgtatttttagtagagatggggtttctcaatgttggtcaggctggtctcgaactcccgacctcaggtgatctgcccgccttggtctcccgaagtgttgggattacaggcgtgagccactgcgcctggccatttaattttttaagaagccaccatactgtctcccatggaagccacaccattttaccttcccaccagcagtgcacaaaggtccccacctcttatctttggttttctttttcttcccgtgggtccatcttttgcacgatcctatctgccacattgcagagattttgacccacaggaagcattcagggtaccttgttgggaagatgacacagatactgttgctacagttccatgcctcccttggggagaagctaagctgcctccttgtcttgtctgggtgtccagctggctctggacagacactgcaggcttgacctccgcatgggcaccgccccctttccaacattatctctgtatgcatttcctaggagggactgccataacagtgtacgacaaaccgtatggctgaagcaacaggaattattctcttatcatcccagaggccagaagtcggatatcaaggtgtccacagggctggttccttctggagtctctagggaaagatcctggctacctcctccagcttctggtggctcccttggctcatggccacattactcccatctctgcctctgtcttcaggtggcatgtgtctctcctctttttatttttttattttttggagacggaatctcaccctgtcgcccaggctggagtgcagtggtactatctctgctcactgcaacctccgcctcccgggctcaagcaattcttgtgcctcagtctcccaagtagctgggattataggaatatgccaccacacccagctaatttttgtatttttagtaaagacagggcctcactgtgttggccaggttggtctcaaactcctggcctcaagtgatccgcctgcctcggcctccccaagtgctgggattacaggtgtgagccaccacgcccgaccccctcttctaaggacatttgtcatcggatttagggccctcctggattattgaggatgatcctgaggcctttaacttaatggcctctgcaaagatccttttttatgttttgagacagggtcttactttgttgcccaggctagagtacaatggcatgattatggctcactgcagccttgaactcctggagtcaagcgatcctcctgcctcagcctcctgagtagctgggactacaggtgcacacccccacacctggctaattttttatttttattctgtagagacggggtcccactgtgttgtccaggctggtcttgaactcctggcctcaagcgatccttccaccttggccccccaaagctctggggattacaggcatgagccactgcgcccagctccctttttccagataaagtcatatccccaggttccaggagacataacttccagggcccaccattggaccagacaccagaagggctggcctggcccagcccatagctaaatggtttagcctccccgaccttccccaggctcccatcatattcaggaccagtggacctccatggccaggtctcccagaccagctttggaaagtcgtatctgtggccttggattcaggaaagggagtcctgcctccacccacaacctcaggactgtggccatcctcgccccagggagggaggtgcacttcctatcccaagaatggccgcagcgatcacacaaagagccggctcagaccggttctgcttttgcccactttcaggcaggtgacacttctccatgccattcccaccaaggccaagggtcaggcacagtccaagcctccccacccagttctccaatttatgaggctgcagcttcctgtgtgttcaaggactcagtgctggaggagccctgggtccctataagaccccttttttaggcccaggccttgaaaatgattggggaagggaaggggccatcatctgtcaagcgacattttgatgccagacctgcagatgcagcacggggaatcggccacaggctgagattgaaacatgagtttcctcctagaaacggacacagcctccctccccaggaatgcaggaaggtgctgaaactggttactagcccggcaaaggaatagaaggaaacatttttttctcctatttgaaagaagagaggacccaggctgggccatcagaagccacctgtgcatcgtgtgtgtccctgtgtgagcctgcagacaaaagactgctgtcttgggctgggcgcggtggctcacgcctgtaatcccagcactttgggggagtgatgcggtggatcacctgaggccaggagttcaagaccagcctggccaacatggtgaaaccccatctactaaaaataacaaaattagccaggtgtggtggctcatgcctataatcccagctactcgggaagctgaggcaggagaatcacttgaacatgggaggcagaagttgcagtgatcccagatcatgccactgcaccccagcctgggtggcagagtgagactccgtctcaaaaaaaaaaaaaaagactgctatgctggagagacaggcgttcagcagaccctgaattgggaacctcgtgctgtcccctggccctgccactccttgggcaccagctgtgtctcctgcataacaggatgggctcagatgagggtgatctggaggccccagtgagctcacatgtctggtgatggcggaccctgtgatagaccggccccaccagacttagccagccccagctggtgcgaaaggatcccaccaggccaccctcttcccacaggggccctgggcagcacatagtctcaccaagccttggctccttgtccactcctcaggagccaccgtgcctgccccagtatggaagaggagtccctgagaaatacatcaaatgatgcctagaacatatttttcctcgaaaaaacattcactgccactacttttagcattgagagatatttggggctgcagagacaccccagtccctgtgctggtaccctcagactcaaggtcccacatgatgccaggtgcctcctgagggacctctgagaacttaatttggaggaaacactttaactgcttggcacagagaaaatgattggtaaggccgggcgcagtggctcacgcctctaatcccagcactttgggaggccaaggtgggtggatcacctgaggtcaggagttcgagaccagccttgccaacatggtgaaacctgtctctactaaaaatacaaaaattaactgggcgtggtggtgggcgcctgtaatctcagctactggaaggctgaggcaggagaattgcttgaacccaggaggcagaggttgcagtgagctgagatcacgccattgcactccagcctcggcaacgagagcaaaactccatctcaaaaaaaaaaagaaagaaagaaaatgataaataaacggcagaacaccagaccatatggatacaaccaagtattgctgggtatcacagacccctgtgcttccaaggacactgtgacaaaattggaaaggaatccccagacccagagaaggtacctgcaaatcagaaccagcaaaggacttgcatctagaatatagaaagagcatttacagctcaataaaaggaccaacacccaataagaaaaccacaaaagacgtcaatgtatacttcatcagagaagagctatgaatggccagcaagcacatgagatgttcagcatcattggtcatcagggaaatgcaaatccaaaccacagtgacaggctagatgcatggctcacgcctgtaatcccaacacttcaggaggctgagacacgtagatcacttgaggccaggagttacagaccagcctggacaacatcacgaaatcccatctctacaaaaactacaaaaactagcctgtagtcccagccactcgggaggttgaggtgggaagatcacttgagcccaggagaacaaggctgcattgagccattatcgtgctactgcattccagcctgcacaacagagcaagatcctgcgtcaaaacgaatgctgggtgcagtggctcatgcctataattccagcatattgggaggctgaggcaggtagatcacctgaggtcaggagttcgagaccagcctgaccaacatggagaaaccccgtctctactaaaaatacaaaattagccaggcatggtggcacatgcctgtaatcccagctactcaggaggctgaggcaggagaatcgcttgaactcaggaggtggaggttgcagtgagtagaaatcacgtcattgcactccagcctgggcaacagagtaagactccatcacaaaaaaaaaaaaaaacccacaaggacataccactgctcacccactagggtggctagaataaaaaagacagtgaataacaaatattggccagggatggtggctcatgcctgtaatcccgcactttgggaggccaaggcgtgcagatcacttgacataggtcaagagtttgagatcagcctagccaacatggcaaaaccccgcctctactaaaaatacaaaaattagctgggtgggggttggcacacccctgtagttccaaccaaccactgtgggggccgaggcaagagaatcgcttgaacccaggaggcagaggttgcagtgagccgagattgtgccgttgtactccagcctgaacaacagagcgagactcccatctcaaaaaaaaaaaaaacaactcaatattaacacaatactaaaatgtaatgttttattctttctgtttttctcttaatgacagagctgtcgtcgagaaatatctgcttgaaaagtctcgcctggtgtctcaggagaaggatgagaggtaggagaatgttttcccaggaatctctgaatgccacgccatgtctacgtttcctcctacagaggagagaagcaaagcaaacgtcctgaggtcggaggaattctgggggaggccgtggaggctctcacaggagcagggcctgcccatccatcttctccccagacctgcccctgtggcctcacactttgtcctcatacctcccaagccacctttgtgtgcctccctggaggttttatccccagtatgtgctcagatgtctgcacaaaatatacttagattggaaacatttctcaagcatggtagcacgtgcctgtagtcccaactattcaggaggcctaggcgggaggatcgcctgagcccgggaggttgaggctgcagtgagctagacaccacacttcagcctgggcaacagagcaagtccttgtctctgtttttggttggttggttggggtttttttggtttgtttgtttgtttgtttttgtttttgtttgtttgagtcagagtcttgctctgtcacccaggctagagtgcagtggtgtgatcccagctcactgcaacctccgcctcctggattcaagcaattctcatgcctgaggcgactctcatgcctcagcctcccgagtagctggaattacaggcatgcaccaccacgcccggctagagtccttgtctcttttaaaaaaaaaaaaaaaagaaaggcctggagcagtggctcacacctgtaatcccagcactttgggaggcctaagaggcaggatcacatgaacccaggagttcgagaccagcctgggcaacatggcaaaatcccatctctacaaaaaagaccaaaaaaaaaaaaattagctgggcatggtgacacacacctgtagtcccagctactcaggaggccgagctgggaggatcacttgaacccaggaggtcgaggctgcagtgagctgtgattgcaccactgcactccagcctgagtaacagagcaagaccgtatctcaaaaaaaaaaaaaaagaaaagaaagaaacatttctgattgacaaataagtgagatgtacacccacccacctccaatcctccagaaatctactcgctcacgacactcatttgttttgttttgtttttttaagacatagtaagaactgacgtactgttttaaatttgtacatatttgaggtgtgctctccaaagccatgttagtagtggttcgcagagtagctattacttggcctccaaaaacaactattttcctcccaattttgacctgtaggaactaccatgtgttttattatttgttacttggggtcagcgaggaagagcgccaagaatttcagctcaagcagcctgaagattatttctacctcaaccaggtaaacagcctcaagcccgagccacaaacgccacctctgttcccggcctcaagctgtttatgtatagccgggaagtcagaggcagcctgccctggcccccgaacccgctcccagaaggcagcattaaaagaacccattcattcccctggtcctggggccctgccccaccagctccagccaaaatcactctggcacgccacccttgccggcccaggaatgcccagagtacccatgcctttgttttccagcataacttgaagattgaagatggggaggacctgaagcatgactttgagaggctcaagcaggccatggagatggtgggcttcctccccgccaccaagaagcagtaagtgtgcgggctcccggggcctgtcccccagagcctacagggggcacgcatggcccttaccagtcactctgaggtctaacctgcaacccagtgaaaacaggcaggcagtgtcctgaacagtgccgccatagggagtgtggcccaatagcagcgatcacatgagaaggggctcaagacattggtcattaggcgatgccaattaaaggtaacgtgaacatacttaacactgctgaattgtacccttaaaaatggtttagccaggctccacgtggctcactcacgcctgtaatcccagcactttgggaggccaaggtggaggattgcatgggcccaagagttcaagaccagcctgggcagcatagtgagacctcatctctacaaaaaataaataaaattagccaggcgtggtagtatgcacctgtggtcccagctacttgtggggctgaggtgggaggatcacttgggcctgggaggacaaggctgcagtgagccaccatgatcatgccactgaactaatcacgccactctgggtgacagagcgagacccagtctcaaaaaaaaaagaatgctgggtacggttgttcacacatgtaatcacagtgctttggaaggccaaggcaacaggaccacttaaagccaggagttcaaggctgtaagtgagctaggattgtaccgcttcatttcagctcgggcaacagagtaagatcctgtctctaaaaatcaaagaagttaaggtagtgaattttatattatgcttatgttactacaatttaattatttttttttttagatggggtctcgctctttcacctaagctggagtgaagtggcgagatcatggctcactgcagcctcgacctcccctggttcaggtgatcctcccacctcagcctcccaagcagctgggactacaggcgcgtgccaccacacctggacaattttttgtagagatggggtttcctcatgttgcccaggctaattttgaattcttgggctcaagccatccacctgcgtaagcctcccagcatgctggaattacaaacacaagccaccgcgcccagcaatttaaatttttttaaaccaggcatggtggctcatgcctgttatcccagctacttgggaggccaaggcaggaagatcgcttgagaccaggagttggagaccagcctgggtaacatagcaagaccccatcaatttttttttaaattatccaggcatggtggcacacacctgtagtcccagctacttgagaggctgaggtgggaggatcacttaagcccaggagttcacagctacaatgagctaagatggcacctctggcccgggcgcagtggctcacgcctgtaatcccagcactttgggaggccaaggcaggtggattgcctgagctcacgagttcaaggccaggctgggcaacatggcgaaaccctgtctctactaaaaatatgaaaaattagccatgcatgatggtgcacgcctgtaatcccagctactcaggaggctgaggcacgagaatcacttaaacacagaaggcagaggctgccgtgagccgagattgcgccactgcactccagcctgggtgacagagcaagactctgtctcaaaaaaaaaaaaaaaagatggcacctctgaatagccagtggactccatcctggacaacatagccagtgactggccagacacaagtaccatcccatcaagttcacagacagcattagacgtcaggacagtggttcctctggtgttggggggctctaggatccaggacttggaatgttctatttcttggtctgggggctagtcagagggatccgtacacttcttttttcttttgtgagacagtttcactagccaggcatggtggtacaaacctgtagtcccagctacctgagaggctgagataggaggctcaactgagcccggggaggttgaggctgcagtgagccgtgatcgcaccactgcactccagcctgggtgacagagtgagaccctgtttccaaaaaaaagaaaatagctgtctagccaggtgcagtggctcgtgccaataatcccagctattcaggaggccaagacaggaggatcacttgaggccaggagtttgagaccagcctgggcaacatagcaagaccccatccctttaaaaatatgtttttaaattagccaaatatggtggcctgtagtaccagctactcaggaggctgaggctgtagaatcacttgagcccaggagttggaggttacagtgagctatgattgtgtcactgcactccaacctaggcgacagagccagatcaaatccaggaaaaagataactgtctgcaaagtcacattccacagaggccatcctcaacagaggccttagacatttttcaaatttcatgcgttccgaccagaatttgctggttttatggattcagcccggttccctgggaagtatctgctgtcttaggaacgtagaaactacccaaatatgagtgccttttctttcccaggatttttgccgtcctctcggccatcctgtacctgggcaacgtcacttataagaagagagctacaggccgagaggaagggttggaggtcgggccacccgaggtgctggacaccctgtcgcagcttctgaaggtactgattgccacctctgtcccttctcaggcctggctcagggccgctggctatctctcagtacgagggaccatacccagaacttcctacgtcagctgaggtttcatcaaccaggacctcacgtcttccgctatcatctctacagtgttccttcctcatttctgatgagctctgtggacaggggcacctcctcctcccaccctcaagtgaaagcctctttaaaactacagctcaggggccgggtgcggtgtctcacctgtaatcccagtactttgggaggccaaggtgggcggatgacctgaggtcaggagttcgagatcagattggctaacatggcaaaacctcatctctactaaaaatacaaaaagaaattagccagtggtggtggtacatgcctatagtccaagcaacttgggaggcagaggcacgagaatcacttgaacctgggaggcagaggctgcagtgagccaagattgcgccactgcactccagtctgggcgacagagcgagactctgtctcaaaacaaaacaaaacaaacaaaaaaaaactacagcttggggctgggtgcggtggctcatacctgtaatctcagctactcgggagaccgaggcaggaggatcacttgaggccaggaggtccagactagcctgtacagcatagcgtctgtcgatctctacaaaaaatacaaaaattagccaggtattggtggtgtactcctgtaatccaagctacccagggggccaaggcaggaagattgcttgagcctaggagttcattgccgccgtgagctgtgatcatgccactgaactccagcctgggtgagtgacagagtaaggccctgtctcttaaaaaacaaaaaattctagtttgatcaagtcattttctcattggacctgccatcccctcctcctccaccggttctcagccaggggcagttctgcccctaggacacactgggcaatgtctggagaactttctggttgccatactctgggttgctcctggcatctgctaggtagaggccatggatgctgcccaacaccccacagcgcacaggacagccccccaatggcaaagaattatccaaccccaagtgcaaatggcagtgaggccgaggagccctaccccagtcttttgttttttaatccatttatgctttgcgttccattattggtacaggagccccagcttctgttgagttcttggggatatgtgagcatctgctgggatatttagagaaagcccctgccagccaggcacggtggctcacgcctgtaatcccagcactttgggaggctgaggcaggtggatcgtctgaggtcaggagtttgagaccagttcgagaacttcaggccccaaagcctgaccaatatggagaaaccccatctctactaaaaatacaaaaattaactgggcatggtggcaggtgcctgtagtcccagctattcgggaggctgagacaggagaatcacttgaacccaggaggcagaggttgcagtgagccaagattgcgccactgcactccagcctgagcaacagagcaagactccatctaaaaaaaaaaaaaaggagaaagctgccgcttattccccactcttgctgctggtgggcagagaccaccagctctgaaagggagcttggcagtgcggggagggatgagcgtgtcggctgtctgggtaaggtctaagcccaggccctgtgcaatggatgggaaccaccagctccaataggcaaggcggccacctggacccgtggctcgcactcacataaggcctgtacatacacatacccgggccacggagcatgagcatccggcaagcccgtgctatgtgggaattctgaaacctgccaagtgtaaaacagtacatcgcaggccaggtgcagcggctcacgcctataatcccagcactttgggaggcccaggcaggcagatcgcccaaggtcaggagttcgagaccagcctggccaacacagagaaaccccatctctattaaaaatacaaaaattagctgggtgtggtgacgggtgcctgtaatcccaattactggggaggctgaggcaggagaattgcttgaacccaggaggcagaggttgcagtgagccaggattgtgccactgcactctagcctgggtgatagagtgagactctgtctcaaacaaacaaacaaacaaaaaccaaaaaaccagcacatcgcgggtgggtgggtgggcttcaggtcccacttctaggcctggctgctgggggtccgtctcccagctgcctcaggctccgggcgttgcctcagtgataccaggacatgcctgataagtcctccatctcccttttccttctccctctccttgacctccaaacaggtgaagcgagaaatcttggtggaggttctgaccaaaagaaaaacggtgaccgtcaacgacaagcttatccttccctacagcctcagcgaggtgagctctgcccaggcactcacagggtgccagatcccaaaaaccaagtgggaatggtctttggaaagagccggcatgggtgggctgttctgtccctgaatgctagaatggaacctaggcagtgcctctgattgtcatgcaagctcaggtgtggcacaagccagcctgggaggcaaaccatgggcctcaggccagaacttgagccacatgcattcaactctgtgtttccagatgttccgtgtgcatgctggttctcactagcaatggttggccagatccagccctccacctggttttgctaataaagttttattggcacatggccatacccattcatttacataccacttaagactgctttggagccatagcagctaagcagagcagttgcaacagagaacatcaggccccaaagccaaaaataatgactccttcatcccttccagaaaagaatttgcccatccctagactctggaacatgacactgactacccttatgtaactcccagcctgtgagtctcaagcctgtgactctaaaccttgatcaggtgcctccctctggtctttgccccagcctggatgttttctctgtgctgtatttctcttgcatttttacatctcaagagcaggatcacttgcagcttgtttaacaataggaaagtacctaatcacggcagggatttttagcccctcacccgatgggaagctgctgtggcatttcaaacaggcaccggggacattctgagcccacatgggtccagggcaccacgtgatattgctgcatatcacccaagacccgagcagcactggtgtccccagaggctccatgcagagccaaaggcaccaggcaggggctgcattctgtgtggctccatttccttgacacccaagaaatgcaaaacgagggggacacattctagatcttgtctgtagctgaatacatctgtcagagctgagacctgaatatgtggggaaaaaagccaatttattccatatagattagaccttaagagcttcttttttttctttttttttttttttttgagatagcgtctcactgttgcgcaggctggagtgtagtggcacaatctcagctcactgcaacctctgcctcctgggttcaagtgattttcatgcctcagcctcctgagtagctgggattacaggtgtgcgccactaggcctggctaattttttttgcatttttatttatttatttatttatttttatttttgagacagtttcgctcctgttgcccaggctggagtgcaatggcaggatctcggctcactgcaacttccgcctccagggttcaagcaattctcctgcctcagcctcctgagcagctgggattacaggcatgtgccaccacgcccggctacttttgtatttttagtagagacagggtttcaccatgctggtcaggctggtcttgaactcctgacctcaggtgatccacccgcctcggcctcccaaaatgctgggattacaggcgtgagccacggtgcccagattttttttttttttccttttgcatctttagtagagacgggcaatccacccgcctcggctcccagagtactgggatgacaggcgtgagccaccacgtccggccacaaaagagctttgatgcacacggtgacagccacatggtgcacccggaagaacaaggggcctgaagttagttagaccctccttgctggttctaccacagtcgcacgccccaccccctccccgagcccaggttcctcactcagcagcaattttggttgctctgaggagcgtatggaaaggcttcagcggccgttccagaggctactgggtctgttaacgcctcagtgtgcaggcacatcctccaggacagggtgaaatatgggtgttggatgagtcgagtgttgacagagaccaccttggctggttgcagtggctcacgcatgtaatcccaacacttacggaggccagggcagaaggattgcttgagcccaggagttagagtccagccttggcaacatagtgagaccccgtctccacaataaaattaaaaattaaggccaggcacggtggctcacgcctgtaatcccagcactttgggaggccaaggcaggcagatcgcttgaggccatgagttcgagaccagcctggccaacatggcaaaaccccgtttctactaaaaatacaaaaattagccaggcatggtggtgcgtgcctgtaatcccagctactcagaaggctgaggctggagaatcgcttgaacccaggagggagaggttgcagtgagccaagactgtgtcactgtacttcagcctgggcgatagaacaagactccacctcaaaaatatatgtatatattaaaaattaaccaggtgtggtgttgtgcgccatagccccagctacacaggaggctgaggcaggaagattgcttgagcccaggaagtggagtttgcagtgagccaagattgcgctagtgcacttcagcctggataacagagtgagaccctgtgtcaaaaaaaaaaaaaaaaaaagtacaaagggccatcttggccagacacagtggcttatgcctgtaatcccaggactttgggaggtcaaggcaggcagatcacctgaggtcagagtttgagaccagcctggccaacatggtgaaactccatctctagtaaaaatacaaaaattagccaggtatagtggcgcttgcctgtaatctcagctacttgggaggctgagacaggagaatctcttgaacccaggaggtggaggttgcagtgagccgagatcatgccactgcactccagcctggatgacagagcaagactccagcgcagggcctgccgtgccggaggtgagtcaccccctctgtgtccacaggccatcactgcccgcgactccatggccaagtctctgtacagcgccctgttcgactggattgtgctgcggatcaaccacgcactcctcaacaagaaggacgtggaagaggcagtctcggtgagtgcccccatttgcttcctcaagcccggccaggggaggccacatcctcactaccaatatccttggtgggcgacctggaacatccggagccgaggcatctgcaatcaagaggctgtttccccacaaggacaggcccaggaaacaggacaggctacgaaattcaacaggcccagggcagaatgaaaacataaggccccttattcaaaaacgacagattctggcatgtacctgtggtcccagctactcaggaggctgaggcagaaggattgcttgagcccaggaggtcaaggctgcagtgagctgtggtggcgccactgcactccaacctgggcaacagagcaagaccccatctccaaaaaaaaattatggattccatgctggtaatggcaaagtgttctgccgagcaacagggactggggacctaacaggtcacagcctgtagagccaacccctctcatgaaggctggctccctcggggtgcacctgcgggcagtgaccattttctctgtctctcccagtgcctgtccattggggtcctggacatcttcgggtttgaagacttcgagaggaacagctttgagcagttctgcatcaactacgccaatgagcagctgcagtattacttcaaccagcacatcttcaagctggagcaggtgcggaaagggcttttttgtcaattttttgaacttggtaaatcagacatcacgtgaaatttaccatcttaaccatttgtaaatattcagttcagcggcggtaagtacattcacatattcgcattgttatgcaaacgccaccaccatacatctccagaactctttcattttgccaaactgagactctgtccccatgaaacactcactccccattccccctcttgcaagccctgaactcaccccattccacttttttttttttttttttttttgagacagggtcttgctctgtcacccagctagagtggtataatcatagcttactgcagcctcaaactcctaggctcaagtgatccttcctcggcctcccgagtagctggaaccacaggtgcacactaccatgcctggctaatttttgtattttttgtagagacaaggttttgccatgttgctcaggctagtctcgaactcctgagctcaggcaatctgctcaccttggtctcccaaagtgttgggattacaggtgtaagccaccatgcctggcccattctattttctgtctctatcatttttgactaagtgcctcatataagtgaaattagacattatttgtctttttgtgactggcttatttcgcatagtataaagtcctcatggttcatccacatagtagcatgtgtcagaatttccttccttttcaaggctgagtaatattccattttctggatgtaccacattttgcttatccatccatccttcagtagacacttgggttgcttccagcttttggctattgtgcataatgcttctttgaacatgggtgtgcaaatatctcttcaagacgctgctttcaattctttcgggtatatacccagaagtggacttgctggatcgtatggtaattctgtttttaacttttttgaagaaccaccatactgttttccataacagctgcagcattttataaggaaatatcatgttgttgcacacccagcccaaagggaaaatagcatgagctagaaccggaatctccctagaggcccagatcattggtgaacttgccccagaatttttctcagtcaaaaggaaaacttaagaaaacccacccagcccaggatgaggcaaatgtcaggaatgttttgagccacagttcatgtgggggcttctgtgtccaaacagaaaatctttttgttagttgagaaacagggttgccttttaaggatttgcttagctcaaggacattgataacctatctgacgtgtctttttttttttttgagatggagtctggctctgttgcccaggctggagtgcagtggcacgatctcggctcactgcaacctctgcctccctggttcaagcgattctcttgcctcagcctcccgagtagctgggactacaggtgcatgccaccatgcccagctaattttttgtatttttagtagagatagggtttcaccatgctggccaggctggtctcaaactcctgatctcaggcaatcagcccaccttggccttccaaagtgctgggattataggcgtgagccaccgcgcctggccctgatgtgtctttttgcagctaaatagtcaaccatccttattcatgtcttctccttcacgttgatgattctgatgggaaaatgaaactgacaggcttatgtaaatatccagctgattttcctattaagctttttggcagtgaagcattgggagtgtagctggtcagaattaagttgtgcaggaagggtgtgacatacacactaaattgtgaagacttagcacatgagaaaaaagaacatacacggtctcagtaccttactgcagcctcaaacgctgaggtttaggcgatcctaccaccacagccccctgagtagctgagactgtagttgcacaccaccacacccagctagttttttggttttattttttgtagagacagggtcttgctatgttgcccaggctggtcctgaactcctggcctcaagtgatcctcccacgttggcctctcagtcatttttatgtcagttacacattaacgtgatcacattttagatacacagggttaaattaagtgtattattaaagttaattttgagccacacagaggcacatatctgtagtcccaactactgaggaggctgaggtgggaggatcccttgagcccaagaggtcgaggctgcaatgagctacagttgtgccactgtactccagcctgggtgacagacgagaccctgtctcaaaaaaaaaaaaattaattaatttcacctttttttttactttttacatgtgattattagaaaatttgaggctgggcatggtggctcatgctaacaataccagtggtttgggaagccaaggtaagaggattgctttaggtcaggagttcaaggctgcagtgacctatgatcacaacactgtaccccatcctgggcaacagagtaagaccctgtctctaaaaaaaaaaaatttgagatggagtttctgcgaaaaaaaatttttttattaaccaggcatatagtggcacatgcctgtagtcctagctactggggaggttgaggcaggtggatcactcgagcccaggagtttgaggctacagtgagctgtgatcgcaccgctgcactccaatgtaggcaacagtgtgagaccctgtctcttaaaagaaaaaaagaaaatgtgaagattcctgttggacaacatagctctggaacaggggccagcaaaccacagcctgtgggtcaaatccagtcccacaaattgtttttataaataaagctttattggcacatagcctttggtttgcattatcatctgtggctgttttcacatcacgactgttagttgcaacagacattgtctggttcataaggtgctatctggcccattacagagaaagtttgccaacctctaaatgattttaagtgtgattttttttttttcttgaggcagagtcttgccctgtcattcaggccggagtgcaatggtgcaatctcggttcactgcaacctccacctcccaggttctagtgattctcctgccccagcctccccagtagctggggtcacaggtgtgtgccaccaggcccggctaatttttgtatttttagtagagacagggtttcaccatgttggccaggttggtcttgaactcctaacttcaggtgatctgcccacctcagcctctcaaagtgctgggattacaggcgtgagccaccacgcccagcccttgtgtgatatttaaagtgccatgctgtgatcagtatttaagaatgtgcattcttgtttcctgtttacaatcattcatttatctagtaagtttatgtaactattaatgtattcatattgatttactcatatgcattttgttactgatatatttatgtttttttttttcactttgaagttcaggggtacatgtgcagatttgttacataggtaaacttgtgtcatgggggtttgttgtacagattatttcatcacccaggtattaaacctagtacccactagttatttttcctgatccgctcactcctcccaccctccaccctccaataggccccagtgtgtgttgttcccctctatgtgtccatgtgttctcatcatttggctccctcttataaataagaacatgcaatatttggttttctgttcctgcattagtatgctaagggtaatggcctccagctccatccatgttcctgcaaaggacatgacctcattccttttttatggctgggtagtattccttgatgtatatgcaccacatttgctttatccattagtgggcatttagattacttatttgttattgtgaatagtgctgcaaagaacacacacatgcagatacatttatatgtaaacatgcctattgatacataaatatgttcctacagtgtggggatcccttatccaaactgcttgggagcagaagtgtctcaggtttgggatttttttcagatttttcaatatttatattatacttactggttgaacatcccaaatctgaaaatccaaaatctgaaatgcttcaatgagcgttgtctttgagcatcacataacattggcagtccaaaagttttggatttttttttttttttttgagatggagtcttgctatattgcccgggctggtctcaaactcctggactcaagccatcctccagcctcagtaaagtattttttactttttattttttgcacagacaggatcttgctatgttgtccaggctggtcttgaactcctggcctcaagcgatcctaccaccttggcctctcagttactttttatgtcagttacatgttaacatgatcacattttggatatatcatgttaaattaagtgtattattagagctatttttttttttttttttttgtgacggagtttcgctcttgttgcccaggctggagtaggactaatggcgcaatcttggctcactgcaacctccacttcccgtgttcaagcgattttcctgcctcagcctcctgagtagctgggattacaggcttgtgcaaccacgcctggctaattttgtatctttagtagagatgggattttgctatgttggtcaggctggtctcaaactcctgacctcaggtgatccacctgccttggcctcccaaagtgctgggattacaggcgtgagccactgtgcccagccctattagagttaattttaagccacgcatcagtttaaaaagtttcctattttgaagcatttcagattttcggattagggatactcgacctgtatgcaatatatgttatgtagatattacatatctgggagataagaaacttaccgaccccgcgccacccctgcaggaggaatatcagggcgaggggatcacgtggcacaacatcggctacacagacaatgtcggctgcatccatctcatcagcaagaaacccacgggcctcttctacctgctggacgaggagagcaagtgagtgtccacaccccgtccatcccggcacatctacgcatgggcactgggtcaggttctgcagcccccagagccttaccccaaatccagactttcccaagagcgcctttttatttttgagacagggtctcactctgtcacccaggctggagtgtagtggtgcaatcaaagctcactgcagccttgacctcctgggctcaagtgatcccctgacgtgagcctctggagtagctgggactacagggtcacaccaccatacccggctaatttttgtatttctttgtagcaacagggtttcgtcatgttttccaggctggtcttgaactccttagctcaagggatcctcccgccttggcctccgagagtactgggattacaggcgtgtgccaccacgccagaccttgtgctgagaacttgtgtctgttcatttcacttgaccacaaaacccaagctcgtgtgtgcaaaatgcacaaacacctcattgtgaaaacatcaacacgtgtgattaattcgtgcacttgaggcacatccgccaggagttttcagcaaaggattatgggcctatgcctagaaactagacactggggccagacgtggtggggcatacctgtggccccagctactcaggaggctgagacaggaggatcacttgagcctgggaggttgaggctgcagggagctgtgatcgtgtcactgcactccagcctgggcaatggagcaagagacaggattggcgagttgttacaaagggcagtgcagtgtgtggaattgggacccagatgctgctgggctctggtctcacttctgagccttcctccctcatccccacagtccacagggcgctgtgaaggcagacaggtcaataaggcacctcattctgggtcacccagttgtagtcactgaaatcacgtgacacataccgaactactttcctgtggctcctctaaggaaccgctacaagccaggtgggctcttgagcccaggagatcaagaccagcctgggcaacacagaaagattccacctcggccaggcacagtggctcacgcctgtaatcccagcactttgggaggccgaggcaggcggatcacctgaggtcaggagttggagaccagcctggccaacatggtgaagccccgtctctactgaaaatacaaaaattagccgggcatggtgacaggcgcctgtaatcccagctactcaggaggctgaggcaggaaaattgcttgaacctgggaggcggaggttgcagtgagcggagatcactccattgcactccagcctgggtgacagaccaagactctgtctcaaaaaaaaaaaaaaaaaaaaagattccatctctacaaaaaaatttttaaccagcctggccaacatggcaaaaccccatctctactaaaaatgcaaaaattagccaggcatggtggcgggtgcctataattccagctacttgggaggctgaggcaggagaattgtttgaacccgggaggtggagttcttaaaaccacagtaatctattctcttatggttctggaagctggaagtctaaagtcaaactgtcagcagagctgtgctgcctccagaggctccaagggaggaccctttcttgcctcctccagcttctaggggtccaagctttccttggcttttggccacatcactccagtccctgcctccctcttcctcttcacatggacttcttccctctgtgtctgcatcattcatctcaatcctgtctcctcctttttttttttttttttttttttttttttgagacaggctcttcttgctctgttgcccaggctggagggtagtggcgccatcttggctcaagttaattggcgtcatctcagctcactgtaacccccacctcccaggatcaagcgattctcgtgtctcagcctcccgagtagctgggatcacaggtgccttgccaccatgcccagctaatttttgtatttttagtagagatggggttttttcaccatgttggccaggctgcttaaaaatttttttttgtagagatggaatctccctgtattgcccaggctagtcttgaactcctgggctcaagcagtcctctcaccttgacctcccaaagtgctgggaccataggtgtgagccattacacctgaccctgtcttctgtttttagaaggacaccatccatatggaactaggtcccacgctaatgacctcatcttaactaattacatctccaaagaccctattttccaaataaggtcacattcaaaagttggtggtatggggttaagatatggacatattgtcttatcagcagctctatcagacccatcccttgccaatgacatctccaaggggctggccagagactcaaatgaatgaggcacatcccctgcctcaaacctagtccctgtccaggtcagggagacagacacatccctctgaggctggggtccaggtagagaatgttcagataagagcatttgtgccaggtgcggtggctcccacctgtaattccaacactttgggaggccgaggtggaggatcatttgagaccaggagttaaagaccagcctgggcaccatagtgagaccccatctctacaaaaaaaaaaaaaaaaaaaaaaaaaaactagctgggcacagtggcatgcacctatagtcccagctactcaggaggctgaggcaggaggatcacttgagcccagagagtcaaggctacagtgagttgtgattgtaccattgcattctagcctgggcaacagagcaagaccccagctctaaaaattaaaaaaaaaaaaaaaaaagtagagacggcagtaggaggagctacgtcatcacaaccaggaaactcccagggtcagatcaggggaagcccgtgaggcaaggcctggcccagcaggctcgagtctctttaaaatcttgctatttttgctcatcatggaattttttttttctttttgcacattgatttagattttctgaaatactgtgctaaaatattacctatctcaatgactgagggttttgggggacactcaaggcagatgccttacactccataccctctttacagtcctggaaatgatatgtttcatagctatagactctcccctccttggccccgttaacgcggagcccccgatgttgggatctgggcatgcgttccgctgcctgtattttcaaaagtggggccgggctcaggcagcatttgccaaaccaacaacatcatttccctcctgggaggcagactcagtcaggtacaaggagtcccttattctgcccccacaatctccccctccccggagcacaacagagccctgcttcatcctcctctcctagcctcttcttccaactgtggagcaggagaaggaccccctgtccaaggtatggcattgaggtacaaatggctccaagaccagaagtcacccaggcccaggattattcttaggagctgcctacgatgggtaacagatccagacctcccaggggacagactttgcagacgccaccaagcctggtcagcgacctctctccaagccccctagaaaacagccatgtggggtcgaagagagtgagccacccagactcaggcactgggctactcaatgttaattctgcagccctggctgggcgcggtggctcacgcctataatcctagtcgtttgggaggctgaggcaggaggatcacttgaggccaggagttcaagaccagcctgggtaacatagcaagtccccttctcttaagaaaaagaaaaacattgtactatagtcccagctactcaggaagctgaggcaggaagatcccttgagcccaggaggtcaaggccacagtgagctgtgatcgtaccactacactatagcctgggcaacagagtgagaccctgtctccaaagaaacaaatatttttctgttttaaaaatcctgaagccttgagagcgtcacttcaccctcagcctccttgtaccaggctgcagctatgccagctgacgcagagagcagagtcccagccctccaccagcgtgttcagcatgaggcaggcaggcacacccagatagcagcgtcccagccctctgccagcatgttcggcatgaggcaggcaggcgcactgtcattccttcctttcttcactccttcacccacccctctgtgcacagagccctgtgccacttcactgctctgcccaccccatgcacccacccacctcgtgcaccaggggtctgcaagataaaatacacagcaggtaaatcagccgctgttcatgcctgcaaaggttccatgttctgttcccagcttcccccacgccacgagccagaccctgctggccaagttcaaacagcaacatgaggacaataagtacttcctgggcaccccggtcatggagccagctttcatcatccagcacttcgcagggaaggtgaaatatcagatcaaggtaggtgtctgcccatcaccactggtggaagcctgagggaagccacagtcagcccagaagcccatgtgggaggatcctcctgtgggcgaggttccagggtgctcagaacccaccgcgaatccccggctccaatgtccaaggcgccatagttcaagaactgccatttgcacttaggatgggccccaccccaccgtcagcccttcctgcgccagcccggggtctttggtaggcgccggtgagtgactatccccgagtgaccgcccacatccatcccccaccaggacttccgggagaagaacatggactacatgcggccagacatcgtggccctgctgcggggcagtgacagctcctacgtgcgggagctcatcggcatggaccccgtggccgtgttccgctgggccgtgctccgggctgctatccgggccatggcagtgcttcgggaggccggacgcctgcgggccgagagggccgaaaaggctgcaggtgggagctggggcgtgaacccacaaaagcgtcactgtcgagaggggggcacatcctgagttcatcttaaagtgaacacttcagtggcatttagtacattcattatgttgtgcaaacgccacctgtctacctgaagtgttcctgtcaccctgaacagaaactcgacctgcgtgtgtaatttaacctcagggcatgctatcagcaactccatcaggcgtctcctttgcaaatgatgccctctgatcccactggccctgggagtttgctgattgtgataatgtagctcttcctagtgttttgcctcttgtttctctctctctgtcttgctctttttttttttttttttttttagagacagggtctctctctctctctctcttgcccaggctctagtgtaatgacgcaatctcggctcactgcaacctctgcctcttgggttcaagcgattctcctgcttcaccctcccaagtagctgggactacaggttaccgccaccacataggctaatttttgtatttttagtagagacggggtttcgccctgttggccaggctggtctcgaactcctgacctcaagtgatccgcccgcctctgactcatgaaatgctgggattgcaggtgtgagtcaccatgcccagccccagcctcttctcttaactgagcattctctactgggaacccagcctcaaagggacatttctgttcccccgtcctagacagagatggtttgaggcagggggtgtgcctgatccactcaagacttgggccagccctatagagttgctgatagaaggatggcagaaagctatgtcctcatttttcccagaggcaacctgaggcctgcatggttgagtggctcacccaggtctaagggctccaaccttccgtcctcagcttcagtttcagttatcagctgtggcttctgtctccggaaggggcttcatgaaaaggaggaaggataaagctttcctgagaaataggaaatagtgctctgttttggggatccaaaacttcacagttacccacccaactttgccccaaacttgagtgatgagctgcttttttttttttttttttttttttttgagacggagtcttgctctgtcgcccaggctggagtgcagtggcgcgatctcggctactgcaggccccgcctcccgggttcacgccattctcctgcctcagcctcctaagtagctgcgactacaggcacccgccaccacgcctggctaattgttttgtattttttagtagagatagggtttcaccatgttagccaggatggtctcgatctcctgacctcacgatccgtctggctcggcctcccagagtgctgggattacaggcgtgagccaccacgcctggccaatgagctgctttttaagatcggtctgccaggtgcagtggctcaagcctgaaatcccagcactttgggaggctgacgcagacgatcgcttgaggtcgggttcaagagcagcctgaccaacatggtgaaagcccatctctactaaaaatgcaaatattagccaggcatggtagtgcatgcctgtggtcccagctaccacagggaggctgaggtaggagaatcgcttgaacccgggaggcggaggttgcagtgagccaagatcatgccagtgcacttcagcctggatgacagagcaagactccgtctcagaaaataaataaataggccggacacggtggctcacgtctgtaatcccaacacttcgggagaccgaggtgggtggaccacgaggtcaggcggttgagaccagcctggccaacatagtgaaaccccgtctctagtaaaaatacaaaaaattagccaggtgcagtggcaggcacctatagtcccagctactcaggaggccgaggcaggagaatcacttaaaccggggaggcagaggttgcagtgagccaagatcgcgccactgcactccagcccaggcgacagtgcaagactctgtctcaaaaaaataaataaataaataataaattaattaattaattaattaaaagatgggtcaaagtgtctgggtacaatggtgcacaccggtagtcctagcactttaggaggccaagacagctctcttgaggccagctatttgagaccagcctgggccacatagtgagaccccatctctccagaaaagttgaaacttagtcatgtgtgtcagcatgtgcctgtagccccagctacttgggaggctgaagtaggaggattgcttgagcccaggagttggaggttacacgagctgtgatcgcaccactgcactcggcctaggcaatgcagcaagaccctgttggtaaaaaattaaaaaaaaaaaaaaaaaggttggggggtgttgcagagactcatgcctataatcccaggattttgggaggccaaggtgggcagatcacctgaggtcaggagttcaagaccagcctggccaatatggcaaaaccccgtctctactaaaaatacaaaaattagctgggcacagtggcctgtagtcctagctactcaggaggcggaggcaggagaatcccttgaactcaggaggcagaagttgcagtgggccgagatcgcgccactgtgctccagcctgggtgacagagcaagactccatctcaaataaataaataaaatgggttaaaataattgcagcctccataggaggccatccccaccaccatccactctgtgtctccggcaggtatgagcagccctggtgcccaaagtcacccagaagagctgccaagaggagccagcaccccttcggaaaaactttaccggtgagcaagaccctgatttgcccaaactgaaatcattaggtggcagcagcattgtttcaaacaacttagggaatgctacattcttttttttttttttttttttcttttgagatggaatttcgctcttgttgcccaggctggagtgcaatggcgcaatctcggctcaccccaacttccacctcccgggttcaagcgattctcctgcctcagcctcccgagtagctgggattacaggcatgcgccacgatgcccagctaattttgttttgttttgttttttgttggtttttgtttgtttgtttgtttttagacagagtcttgctctgttgcccaggctggagtgcagtggcgtgatctcggctcactgcaggctccgcctcgcaggttcatgccattctcctttctcagcctccggagtagctgggactacaggcacccgccaccacacccggctaatttcttttgtatttttttttaactagagacggggtttcaccgtgttggccaggatggtcttgatctcctgacctcgtgatccacccgcctcagcctcccaaagtgctgggattacaggcgtgagccactgcaccctgcctaattttgtatttttagtagagacggagttactccatgttagtcaggctggtcttgaactcctgaccttgggtgatccacctgcctcagcctcccaaagtgctgggattacaggcgtgagccaccagggaatgctacattctaaacccaggtcgaggttgctctgaataagtcactgagcttccatttgaaacagaaagacccagaaccaagcagcatttggtggctgcttttctggacacagaatagcaggccgtggtgcatcatgcgctttagggagatgggaggaggctcagtttacaaaggatccattttatggcctagggtgggcactgggaggtagagcccaagcatcgatggtggtgcggagagacgggcttgattgattggagagttcttcccccatcctgcctggagtggcccaaaagtagttctgccaagttacttcattcacagtcagaaacacatacactttgatattgcacatgagatgacacggggtcttttgtggaccctagcaatgaccaagggccctgcacgcacccaagcatgtgccagcaccagggtagaaaagtgagcaggctggccagacgtgatggtgcacgcctgtaatcccagcactttgggagaccaaggcgggcggatcacttgaggtcgggcgtttgagacccgcctggccaacatggtgaaacctcgtctctactaaaaatactaaaattagccaggcgtggtggcgagtacctgtagtcccagctactcgagaggctgaggcaggagaattgcttgaacctgggagatggaagttgcggtgagccaagatcgcaccactgcactccagcctgggtgacagagcaagactctgtctcaaaaaaaagtttttggaatcacctttttcacccaaaatgggacacaagtaaggagaatgcattcctctgttgtttttgtttgttggtttttttttttttttggtcccccaagttcccaacagctagaaacttccttctatttcattgtgtgggttgcatttttgttttgttttgttttgcttgagaccaggctattgtgcagtggtgtaatcacagctcactgcagcctcaacctcctgggctcaagcaatccccccacctcagcctcccaagtagctgggacaacaggcacacgccaccacgcctggcttattttttcttttataaagacagggtctgattatgttgcccaggctaatctcaaactcctggcctcaagccatcttcccacctcagcctcccaaagtgatgggactacaggcatgagccaccacacccagtcctcttttttttttttcttgcctccgttaccccaaagacaaagtgacttctgacctgcggtagcagaagcagcatccatctccccagggcctggccacagggctgcaggtcccgcccaaggagcatgttaagtttatacagattctccctttcagctgctcaatgctagatttctcatttgacggctctgaggagttcgatattaacgcttttgaggacatcattgctttctatgaaagcaagaagtaagtgcagaaagggcctttgatcccgaggccagcaaggcaccaaggggagccatcttccccaggtgctcagtgctgcgtccaggacacagacagagaggactggccgttcagggaatgccagggcctgcaagggccactcctgccagatttgcagatttagccaggtcggcagggctgcgggtgggccaaagtcatgggcctcattccaagccgtggccgctgcactgaccaccctgggtgtgaaggccactcgcatatagaggtgacaggcgacccctctgttgcctttgctctgcctccctggagggctggggagagcaggtaagtggggccatgggggcacttggcatggtgcatggagcacaggggctggggtcgggtccttccaggccacctgccgagagctaaaacatgtgctttgaacgactgccagcaggatgcggtagcacgcacctgcaatcccagcgctttgggaggccaaagccggaggatcacttgaggccaggagtttgaaaccagcctgggcaacatagcaagaccacacgcctacaagaaaaaataaataaaatgtctggaataaggaattcaaaaaaaaaaaaaaagcaggaaaaaccagatcctcatttctagaagttctgagttctgtcaaaaacatttgtcatttagacattcctcactaatatttagtttgaaagcatccagttttcatctctaaggcattctaattcacacacggtatcagtgccaaagtttgcacctccgcgtgcgtgctcaagcctaagcccacagccatcaaacaaaatgaagcgagtaaggttgagtgctttgagggtaattatccccttaaactagggtttctctggccgggcgcagtggctcacccctgtaatcccagcacttgggggaggcatacgtgggcaggtcacttgaggatgggaattcaagaccagcctggccaacatggtgaaaccctgtgtctactaaaaatacaaaaattagccaggcgtggtgtgcacctgtaatcctagctactggggaggctgaggcaggagaatcacttgaacctgggaggcggggtttgcagtgagccgagatcacaccactgcactccagcctgggcaacagagcaagactctgtaaaaaaaaaaaaaaaaaaaaactagggtttctcaacctcagcactgtgccagatcattctctggggtgggcacccgtcctgtagactgtagggtgttgagcagcatccctggcctccacccaccagatgccaggagagcacccccacccccaagtcatggcaaccacaaatgtctgcagacattggcagatgtcccctgatggggatggtaccgccccggttgagaactgctgtgttcaaactgtggctcttgtattcaaattaattcctccaaaggccttaatgaagccaacaaggagattgacatctggccacaaaatcatggagagagactaatttgctcctcccacagagaccctccctagggtcttttttctgagtcgccccaactgatttttttttttttttttttttttttagacagagtctcactctgttgcccaggctggagtgcagtggtgcgatctcggctcactacaacctctgcctcccaggttcaagcgattgtcgtgcctcagcctccggagtgactgggactacaggcatgcgccaccatgcccagctaatttttgtgtgtttagtagagacggggtttcaccatgttggccaggctggtcttgaactccctacctcaggtgatctgccctgctcagcctccgaaagtgctgggattacaggcatgagccaccgcgcccagcctgtcatggaatttaaaaaataaataggctgagcagggtgatgcatgtctgtaatcccagctactcaggaggctgaggcaggagaatcgcttgaacctggaaagtggaggttgcagtgagctgagatcgcaccactgcactccagcctgggcaacagagcaagacactgtttccaaaaaaaaataaaataaaaataaaaataaatttaaaactaaataaatatccccagccaggcgcggtggctcacacctgtaatcccagcactttggaaggctgaggtgggccgatcacaaggtcaggagttcaagacctccctgaccaacatgatgaaaccccatctctactaaaaatacaaaaattagccgggcatggtggtgcacgcctgtaatcctagctatttaggaggctgaggcaggagaattgcttgaacccaggaggcagaggttgcagtgagctgagattgcgccattgtactccagcctgggcgacagagtgagactccgtctcaataaataaataaataaataaatatccccaaaggctcttaaatatgagaactttttcagtgatccaaatgaaaaggatcgaataaagtggaatgaccagatggaaataatttttttttttttttttttttttttgagacagagtctcgctctgtctcccaggctggagtgcaatggatggcactatctcagctcactgcaacctctgcctcccgggttcaagcaattctgcctcagcctcccacgtagctgggattacaggtgccctccaccatgcccagctaactttttgtatttttagcagagatgagtttcgccatgttggccaggctggtctcgaactcctgacctcaggtgatccacccgcctcggcctctcaaagtgctgggattacaggtgtgagccaccgcacccagctggaaatgatgtattgaaaaggatcaatgatctgtgttgccaagtccaatttgcctcaaagccctgccccgctccagggcttggggaggctggcccagtccccatttctggcaaaagagagaggggcagcattgagcacagtgtctttcccccagctgcatgttttggcttcagtggcctggggatggtcccaatggcgctgggaaccccgaggtggcaggcctgcttctaactccatcttctttctgtcactgcgccccctccacccctcccctcagcgatttgcataaccaaatgatcaagagcatcaaaggattgccctggcagggcgaggacccccgtagccttctccagtccctcagtcggctccagaaaccccgcgccttcatcctgtgagtcccccaccaaggccctgcttacaagtgcgacaaccgcctcccactactcctgcgaccccggcggggcctgcagtcttcctaatttgcatcggccactaaaaccacagtgctgtctcatggcccacccccagccatcactaaatgccaatcaataacacccctggcctctgtctgcactgtggcccaggcacagccggcttcccagcacacggggcagcttcccaggagcactccttcttcgaggcatctaattttccacccgcaaacgtgccatcctccgtctcctccccgtgcctatctggcttgcagagcaaagcttgctcccgcctttgccactgtgagtttgcagagaagccatctgcagcagggcatgcgatttcccagagagggtggccctgatctctgcaggtggccacataagccagtcaggagagcccagaaggtgcataaaccggtttgggatcccgactgttagcacactgtgggattgagtagtctctgctttcagcctgcaaatggggtaatgactctcatgcttccattatgctgacccagcaccaggcaggcagcagcctcagctgacaagacatccacctgcggtcaccacatctcgccttttagtggccattggggtgtgggctggctgagagcaaagcttgcacctgcatgggagccaatgagagccagtttctttctttctttctttctttcgttcgttctttatttcgttctttcgttctttttttgagacggagtttcactcttgttgcccaggctggagtgcaatggtatgatctcggctcactgcaacctctgcctcccgggttcaagcgattctcccacctcagcctcctgagtagctgggattgctaacacctgccactacttccagctaattttttgtatttttagtagagatggggtttcaccatgttggccaggctagtcttgaactcttgacctcaggtgatccgtctgtcttggcctcccaaagtgctgggattacaggcatgattcaccgcccttttttttttttttcttttttaagagatgggggtttcattctgttgcccaggctacagtgcagcagtgaaacgatcaccgctcacggcaggttcgaccttctgggctcaagcaatcctcctgcctcaacctccagagtagctggaactacaggtgcgcattaccacacctgtctaattttattgtttgtagaggtggaatcttgctatgttatagcccaggctgtcaggctggtctcaaactcctgggctcaagcgatcttcctgcctcagcctctcaaagcactgggattacaggcatgagccaccgcacccagtgggagcctgtttaaaacttctgttccttttttttttgaggcagagtctcactctgtcgccaggctggagtgcagtggctcaatcttggctcactgcaacctccacctcccgggttcaagtgattctcctgcctcagcctcccaagtagctgggattacaggtgtgcaccaccacacccgactaatttttttctgtttttagtagagatggggtttcaccatgttggccaggctggtcttgaactcctgacctcaaatgatccgcccacctcggcctcaaacttttgtccttgttgtgccttattttaccccacagggattcaggtgaaactgaatgcaaccacggatggctaggcatctcacagatctacaagttaccatctccttagccggtcttcaaaaggcaccaggccttttgaataaataaatatatttacttatttatttattttcccccttggtctgcaagattccataaggtgtctgagaacacaggagctatccccttccttacctcggccaaaagagcagctttgggttttggggggggttttgagacagagtctctctctgtcacccaggttggagtgcagtggcacgatctcggctcactgcaacctccgcctcctgggttgaagcagttctcctgcctcagtctcttgagtagctgggattacaggcacccgccaccacacctggctaatttttgtatttttagtagagacagggtttcaccatgttggccaggctggccttgaactcctgacctcaggtgatccgctcacctcagcctcccaaagtgctgggattacaggcgtgagccactgcgcctggccagctttggttttcttctttcccaccagcatgatcctgaaaggagctcccacccaggccccattttggttattttgcagggcaagtccctgccctgccagcagagggttccagaagggcctctgtgggcctgcttggcatctaccagcacatggcaaagacagcctggtcacctggtcaccaccaggactgctcaggctccctccgccccactcggcatcctgctgtgatctgggggatatgtcagttcctccatagcaagccccgctggatgcacgtcccaccctgtagattcctagccagcccctcctacttctcagacatccgaatggcccccagactaaacactttactcagctttggggcagccaccagcagagtccgggtgccgccaacccagggaaactggtgtccacagacagtggctgaggcacgccacggtgtgcagcgtggagaggtggcggtggccttgttgcacttgcgccttctcactctctcccctctctctgtgtctctcagtctaacccgccaggcgtggcttgctgaactaacccaaatcccgacactgtgttccttttgttcacaaaaccatttttaatattttgacaggaaaagtaaaggtatcaaacaaaagcagatcattccaaaggtaaaaaaaaaaacacaccccgcgcgacacgttccaagatatcttgcttctctgcccgtcttgagagctttcacttctgcaacttcatttcctcctccttcccactatctccccctccctccaagaaaaaaaaaatgttctcgtgttgagatgatttagagctgtctctttatgggtttcccagaagcagggtctgagatggggtatttgcacacacagcggcttatggaagagggcttacgtgagaaggcagagagaaggggtgagggaggaagctaggggcgtaagcatagctgaagtctggcctcagcctggtcccatggggagctctagtgggttcatagcaccacagagctcatcctgccccaacgtaatgggacccttccgtttaacacccccatcttcagtccctggctactgggctgcttccagacaggacagagaacctcccaagcgctctgtctcgtttccacatacaagtgcagcaatttaagaaatttgcaagaagagtaagaatagccttgcagtctagttagcagatgggagagggctaattcctcttgtcagctgatagaactggctgacacatgatggtggcctgtccgatgagctcatgcggatggcacagaaaggacctggcccttcttgactcaagtaatgtaaactgtaggagctatgcagaggagagggacggccaggttcagtagcactggcttcctctctaacccagaggaagaggaaatggggcagccactcaggctgtgaaagaggctgtcatcagccctcccggaaccagcgctgtgtgcaaggtgcaaacccacctcattccactgggcccacatcaatagtgtggtcctgagaccaaacctaagagctgctgcccgggcactcgctgcggggacgctgttctgccctggcttcggggacacctgtgatgcctccccgtgcccgtgtgggctgtgggagggcaggccggaccccatgtgtctgtcctagaacctactggactccaagtccctgaaactcatcatcagcatgactctgcacgaccgcaccaccaagtccctactgcacctgcacaagaagaaaaagccaccaagcatcagcgcccagttccaggtaggtggagcaggagaggcagaaggtggcggtcagctcagcctcaggcttgtgtagcttcacccgacaccgagcacagcccgtctctagtaaaaatacaaaaattggccgggcgcggtggctcaagcctgtaatcccagcactttgggaggccgaggcgggcggatcacgaggtcaggagattgagaccatccttgctaacacggtgaaaccccacctctactaaaaatacaaaaattagccgggcgtagtggcgggtgcctgtagtcccagctactcgggaggctgaggcaagagaatggcatgaacccgggaggcggagcttgcagtgagccgagatggcgccactgcactccagcctgggcgacagagcaagactccatctcaaaaaaaaaaaaaaaagatacaaaaattagctgggcatggtgggcacctgtaatctcagctccttgggaggctgaggcaggagaattgcttgaacctgggaggcggaggctgtagtgagccaagatcacgccattgcactccagcttgggcaacaagagcaagactgcgtctcaaaaaaaaaaaaacaaaacaaaacaaaaaaaacactacatccgtggtcccttctgaggttgacacatgtttcaaatctccagaaagcgtttgtctggtcctccccagccccagccttccacctgaggcaaaaacaagcactggtggccctgggaccatggggaccacataactccctcgagggtttccagggatagcgcaggcttgggtcagaacgtccagctggaacctcctgtgtcccaccaccagggacccacatctgtgcagaccccatccaccccacactgatgctagagtgtcccaggtctgctcccacagaacagcggctgtcagggtccctgattcaacccaaatgctttctctttcccttaacagacatcccttaacaagctcttggaggcactggggaaggcggagcccttctttatccgctgcatccgttccaatgctgaaaaggtgagtttctctaaggtgtttgggaggagaaggcccatgccggactcttaggggtgtcggtgtccctgcatccagccccagcctccacgcagtatgggggacggtgcagcagtccatccagaggcagccggggatggagaattagcagtgaggatggtccaagtggccatttaagagcagggacatcatctggaacatggagaggcccagagaaggtttgattagggagcgacaggtcaggggtgcttttcagatacatcccaaagagtagccggtgcaaggagtctaccagaaggcagaggctgagattacatagcagagtctcagaggcacacacagcccgctgctcacattacaagtttctagagagacccttggagcccccgtgggaccaccagcaggggctccaggctcagcactggcacaggcttcctttaccccagaggtccactccatccctgggaggacagctcggggactttgccagggactgagcaggagtgtgggctcccagacaaatgtgagcacacagccaggcaggaacctcccgccaactgtacctggggagatgctccgtagtgcaccttctctgctcgtgggctgtgccagcagatgattctctgtgataaaacccattttgtgcactggagggtggcagcatccctggcctccacatccacccccagtcatgacaaccctcctcattctttcccgtttgcctttgtttgtttttgtttgtttgtttttgagacagaatctccctctgtcacccaggctggagtacagtggtgcgatctcggctcactgcagcctcgacctcccaggttcaagccatcctcctggctcaccctcccaaatagctgggattacaggtgcccaccacgccaagctaatttttgtatttttagtagagacggggtttcaccatgttggccaggctggtcttgaactcctgacttcaagtgatccacccatttcagcctcccaaagtgctgggattacaagcgtaagccaccgcgcccagcaccgtttgtctttatagcaacaccatgccttatcccttactgcccaccagagtgaagtccagacccctaagctccaggcttaaagcccactgaggcagctgcatttccagcctcttctctcccctggcaggaagcatctccctgtgtccccatcagacccttggcttcttccttctcctgtgggcctccacccagctgttctctgcctgttccctcctcaggacacagcccagcatctcctctctcctgggacacctcccatggggtgctgggctttgtccgccccatcacctgtgtgtgactcctgaccccagaccaagctctcctctccaccgaatccccagcacttaccccagtgcctggcagagaacaggcccggaacactgggctttgtccgccccatcacctgtgtgtggctcctgcccccagaccaagctctcctctccaccgaattcccagcacttaccccagtgcctgccacagagaacaagcccagaacagatttgcatttgggttctttttttttttcttttcttttttctttcttttttttttaaaaaataaatttaaatgactagagatggagtctcactatgttgcccaggctggtctcgaactcctggcctcaactgatcctcccatcttggcctcattccagaaagagtgtctggagcaaggacggaccccttgtccaggtgctcctggctgccgtgccgtagaacactcccaggtcggctagccagcacccacgtgtgcaccctgaccatgtctgtgttcggcatcccaagaggcagtggtcgcatggggaagtgccctcatctcacagttcccaggcctgagccagcaacagacttgggcatcctgtcaggtcaaggccacctgcctgatgtctcgcattcccatttcagaaagagctgtgctttgacgacgagctggtcctgcagcagctgcgctacaccggcatgctggagaccgtgcgcatccggaggtcagggtacagcgccaagtacacgttccaggtaggccacaagcacatatacctggacacacctgttccgtggcaaaggcaatcaccctcttccaaagagagctccttgctggagtgtaaactcagcaggttggccaggtgcagtggctcacgcctgtaatcccagcaccttgggaggctgaggcaggcggatcacctgaggtcaagagttcaagaccagcctgaccaacatggtgaaaccccatctctactaaaaatacaaaaattagccgggtgtggcagcagctgcctgtattcctagctactgaggaggctgaggcaggaggatcccttgaatccaggaggcagaggttgcagtgagccaagattgagccactgcactccagcctgggcaacagagcaagactccatctcaaaaaaaaaaaaaaaaaaaaaagaagaaacccctgcctcatgccaagagctagtacctgtgtcaccctgagcccaaagccagaggtgacagcgcctggttccctttcacgctttcccttcatagccccagggactagaatgtaatgtgcctcttttctcatccactgaatagaaatagtgtctttctaatcctatgcggataagaaaagcaaaattataaaaaatgcagaaatgctggtgtattttaccagtgcttggcccttaaatatttgaaataataatttactcaaaagaaatgttctgggcgggtgtagtggcacacgcctgtaatcccaacactttgggaggccaatgcaggaggatcaattgagcctaggagtttgagaccagcctggacaacatagtgagaccccatctctgcaaaaaatttaaaaatcagctgggcacagtggctcacacctataattccagcattttgggaggccaaggcaggtggatcacttgagatcaggagttcgttaccagcctgaccaacatggtgaaaccccgtctctactaaaaatacaaaaaaaaaaaaaaaaaattagccaggcatggtggggcacacctgtaacctcagctacttgggaggctgaggcaggagaattgcttgaacccgggagatggaggttgcaataagccgagatcacgccattgcactgcagcctggccaacaagagcaaaactctgcctcaaaaaaaaaaaaaaattagccagacaaggtggtatgcacctgtggtcccagctactcaggaggctgaggtgagaagatcacttgaacccaagtagtttgaggctacagtgagttatgactgagccactgcattccagcctggatggcagagcaagaccctgtcttaaaacaaaacaaaacaaaacaaaactagaggcccagtgtggtggctcatgcctgtaattagcactttgggagggcaaggcaggcagattgcttgagctcaggagcttaaaatcagtctaggcaacatggtgaaaccccgtctccacataaaaatacaaaagccaggcgtgctggcatgcaatgtacttccagctacttgcggggctgaggcaggaggattgcttgagtctgggaggttgaaggtgcagtaagccatgtttgcaccactgcactccagcctgggcaagactccgtctcaaaaaaaaacatgttcctccagctacaatctaactcccccacaagtcctagactgtaagccccattgcaagggtgactgtggttcccagccacctcgaccatctaaaagatctaggaccttgtatctgcagtggtctttcttaagattacagactgttggctgggcgcagtggctcatgcttgtaatcccagcactttgggagcctgaggcgggcggatcacgaggtcaggagatcgagaccatcctggctaccacggtgaaaccccgtctctactaaaaaaaatttaaaaattagccgggagaggtggcgggtgcctgtagtcccagctactcgggaggctgaggcaggagaatggtgtgaacccgggaggaggagcttgcagtgagccaagattgtgccactgcagcccagcctgggcggcaaaacaagactccgtctcaaaaaaaaaaaaaaaaaagattacagactgttgacctggcatggtggctcacacctgcaatcctagcactttgggtcacgtgacccatttaccactgcacccagctgagaacccatttctttggttttttgtgtgtgtgatgggggtggtgcagagccttgctctgtcgcccaggctggagtacagtggtgtgatctcggctcactccaacctccatctcccgggttcaagtgattctccttcctcagcctctccagtacatggggttacaggcgcctgccaccattcctggctaattttggtagagacagggttttgccatgttggccaggctggtctcattggttgagctcaggagttcgataccagccttggcaacatggcaaaaccctgtccctacaaaaatatttttttaattagctgggcatggtggctacaggactatgtgccgtagtcccagcttccagggagactgaggcaggaggctcacttgagcccaggaggtcaaggctgcagtgagctgagatcacaccactgcactccagcctgggtaacaaagtgagaccccgtctcaaaaaaaaaaaaaaacagactatttcttttttttttcttaagacggagtctctctctgtcgcccaggctggattacaatggcgcaatcttggctcactgcaacctccgcctcccaggttcaagtgattctcctgcctcagcctcccaagtagctgggactacaggtgtctgccaccatgcccggctaagtagagatggggtttcaccatgttggccaagctggtctcgaactcctgacctcaggtgatccacacacctcggcctcccaaagtgctgggagtacaggtgtgagccaccacacccggcccagactatttctgaaagcctgaaattttagatttgtcattaccattcctgtcaaacccagcttcaccttaaccagggtcaccagatctctgtctcctcatcgctggccagaacactcacctagattttcctttctccacccaaataacctaggatttcaccgagcagttccaggtgctcctgcccaaggatgcccagccctgcagggaggtcatctccaccctcctggagaaaatgaagatagacaagaggaactaccagatcgggaagaccaaggtcagcgctcctgcccctcggggcactacaaacccacaccctgccttccaccgcacaccgtgtctccccaggcccccagggccactctctgaaacatacagggctctgtctaggaaatgcatttctcgggacccagcagagcactgcacctaagggataggggccgccctggctgagccccacctgctgttcttcagcagggctcagcgactccctccgcgtcacctgtttattgctgcctcacaggtaggaaagggacgatcgtgctaactggcaggatttaggagatggtcagtcccctttacggtatgaggcaggaggtggcctgcacttgtcctccctttcagagactgtctcccatctctgggcatgtgtttgcctcttgctatgggagcattactcagccacccttgtttaacaagcgccaaggtcagtccccctgaaggcctcacctggtgtaaaaaattcccttccagccaagcgaggtggcatgcacgcagagtcccagctacttgaaaggctgaggtgggaggatcccttgagcccaggagtttgagaccagcctgggaaacatagcgagaccccatctctatacaatatttaaaaattagccaagcgtggtggcatgcacctgtggtctcaactgcttggcaggctgaggcaggagtttgagactgcagtgagccctgattgcaccactgcacttcagcctgggtgaccgagcgagatctcatttcttttttcttttttgtttttatttttgagacagagtcttgctctgttgcccagacaggtggtgtgatctcagctcactgcaacctccgtctcccaggttcaactggttctcctgcctcagcctccaagcagctgggattacaggtgcccgccaccacacctgactaatttttgtatttttagtagagacagggttttattacaggcacacacctgtagtcccagctactcgggaggcttaggcagaagaatcgcttgaaaccgggaggcggaggttgcagtgagctgagatcgggccactgcactccagcctggtgagactccatctcaaaaaaaaaaaaaaaaagggggggccacagccaggtgcagtggctcatgcctgtaatcccagcatttttgggaggccaaggcgggcagatcacttgaggttgggagttcgagaccagcctggccaacatggtgaaaccctgtctgtactaaaaatacaaaaattagccaggcctggtgatgggcacctgtagtcccagctactcgggaggctgaggcaggagaatcacttcaacccagtaggcggaggttgcagtgagccgagatcatgccactgcactccagcctgggcgacagagtgagactccatctcaaaaaaataataaataaataaataaataaagccctggttggtcagcacaccagcctaggtctcactctggagtgggctatgcagacctcccaggcacagagatggtgtcaggggcagtgcagctgaccccacctgaccccgtgcccaccaggtcttcctgaaggagacggagcggcaagccctgcaggagacgctgcaccgggaggtggtgcggaaaatcctgctgctgcagagctggttccggatggtgctggagcgtcggcacttcctgcagatgaagcgggccgccgtcaccatccaggcctgctggcggtcctaccgggtccggagggcgctggagaggacgcaggctgccgtgtacctccaggcctcatggaggggctactggcagcggaagctctaccggcaccagaaacagagcatcatccgcctgcagagcctgtgtcgggggcacctgcagcgcaagaggtgagcagagccgggccacgctcctcggaatattccagaagccaaaaaggtcactcaccaaattgctgcccgtgatataccatctggcctgtggcactaaggggatgtcattctggacacagggaaaggctggtgggaaaccagatgcctaggcactcatgggctgcagagaagtgctccaaggctggcaggcagcactcagggacaaagccctgctttgccattggctgcacccattctctgcccagggactcccctgtacctggatcggtcagggaacacctggattcagggttggaggggctgcctggaccagcccaacactcacatggagctggggcatccaccgggcacagagaagcccccaggaggatatcagcagctcccgtcccagcacccacagctccgagcccagcccctccccgacctaggcaccctgttcacctctcccctgcccacacagacccagctctgccacaagtcaggtcccagctcccggagcaggccctacccacacatgcaaaagcctcctaggccaggtgcaatggctcatgcctgtaatcccaacactttgggaggcctagatgggaagatcgcttgagcacaggagttcaagaccagcctggccaatatagcaagatgccatctctacacaaaattaaagacttagccaggtgtggtggtacacacctgtagtcccagctattcaggaagctgaggtgggaggatcacctgggcctgggatgtcgaggctgcagtgagctatgatcacaccactgcactccagcctaagtgacagagccagacactgtctctaaaagcaaaacaggctgggcatagtggctcacacctgtaaggccagcactttgggaggccaaggcaggcagatcacatgaggccaggagttggagaccagcctagccaacatggcaaaaccccatcttacgaaaaatacaaaaatttgccgggcttggtggtgcatgtctataatctcagttactagggaggctgagacacaagaatcacttgaacccgggaggcagaggtcgcagcaagccaagatcgtgccactgcattccagcctggacaacagagcgagactctgtctcaaaaataaaataaaataaaataaaataaaagcaaaacaaaaagcctcctagaaaaagacccaagggaaagcccacagtggaccccaaaggagtttgaggcttcttaatagaacccacccaccacagccccaacaagggtcctctcccctaacaaggcagccaggcagacgcagggcaggggtatctgtgacactgagggggcaccaccctcagcctcctttcctgatcgaggagattcctgctttccagaagcatctctcagggccactgggcacaggcgaagccccgtctgcagcccgcaggctgggggtcccatcggaactcagtgggaggtggagggagtgtttgtttctgaaccagctgtctgctttttcctcactccagcttcagccagatgatctcggagaagcagaaggcagaagagaaggagagggaagccctggaagccgcaagagcaggtgctgaggagggcggacagggtcaggcggctggagggcagcaggtagctgagcaggggccggagccagcggaggatggcgggcacctggcatcggagcctgaggtgcagccaagtgacaggtcccccctagagcactcctcacctgagaaggaggccccaagcccagagaagactctcccaccccagaaaaccgtggcggctgaaagtcacgagaaagtccccagcagccgggagaagcgtgagtcgcgtcggcaaagagggctggagcacgtcaagttccagaacaaacacatccagtcctgcaaggaggagagtgccctcagagaaccttccagaagggtcacccaggagcaaggggtgagtctcctggaagacaaaaaggagagcagagaagatgaaacccttctagtcgtagagacggaggctgagaacacatctcaaaagcagcccacagagcaaccccaggccatggcagttggcaaggtctctgaagaaactgagaagacgctgcccagtgggagccccaggcctggccagttggagcggccgaccagcctggccctggacagcagggtcagcccaccggcccctggcagcgcccccgagacccccgaggacaagagcaaaccatgtggcagcccaagggttcaggaaaagcccgacagccccggaggctccacgcagatccagcggtacctggacgccgagcggctggccagcgccgtggaactgtggcggggcaagaagctggtggccgccgccagccctagtgccatgctcagccagtccctggacctcagcgacagacaccgggccacaggggccgccctcacgcccacagagtaagccccacaccctcttttgtctgagcaccagggtccaggccaggtgggcaaggccaggggcagtgccacacatcctggaaacacatgtgtaatcatgcccagtgggtgtgcgggaggcctgagggaggaggacgagcaggacatgctaaagaccaagtgaagacaaggcagccagccagggcccaggctgggacctggagccttgaggggtccccagaaggagctgtgctcacacagaaaggccccggccttgagagaggtggctcctcaggtcaaggtccctgctgcccagaaatcttgggccttggtttctaattggtgaacaggactaactgcactcctcggggttaaaggagcaggggcttgctctgcctgagccttagtaagccaagtgtcagtgacttggaatctccagctccctcttccagagggcctgcaggaccaaaggaaagaaatcagggaggagacaggccttccctgcagcaggcctgctcagcctcccactgctcgtattgggggccagatcattctctgcggtgggggctgtcctgtgtatcataagatgttgagcagcatccctggcctccacttaccacatgccaggagtattatcgatagatgatggatggagggagggagggagagagagagagagggaaggatgtgtgggtgggtgggtgggtgggtggatggatggaagatagagatgatggaaggatggatggaaggaagatagagatgatggagggatggatggatggaaaatgatagaggtgatgaatggaagacagatatagatgatggatggatggaagatacacatgatggatgaagggatggatagatagaagacaggtagtaatgatggatagaggcatggatggatggatgatacagatgatggggagatggatggatagaagatgggtagaaattaggctgggcgcgatggctcatgcctgtaatcccagcattttgggaggccaagagtttgagaggagttcgagaccagcctggccaacatagtgaaaccctgtctctactaaaaatacaaaaattagctgggcgtggtggcgcatgcttgtaatcccagctacttgggaggctgagacaggagaatcgcttgaacctgggaggcagaggttgcagtgagccgagatcaagtcactgcactccagcctggatgacagagatgagactccgtctcaaaaaaaaaaaaaaagtagagattatggatagaaggaagatagatgccgacgatagatggatggaaggaagataggtaggtagagacaatgaatggagggatggaagataggtagagatgatggatggctgggtgggtggatggatggatggatggacagacagaaggatgggtggatggctggaagatagagatggagagatggaaggaacatagagttgatggatggagggatggatagatgataggtagattatggatgggaggaagatagagatgatggagggacggatgggtagaagataggtagagccgggttcgggggctcacacctataatcccaacactttgagaggctgaggcgggtggatcacctgaggtcaggagtttgagaccatcctggccaacgtggcgaaaccccgtctctactaaaaataccaaaaattagctggatgtgttggcgcatgcctctaatcccagctactcgggaggctgaggcaggagaatcacttgaacctgggaggcagaggttgcagtgagccgagatcacaccattgcactccagcctgggcaacaagagcaaaactccgtctaaaaaaaaaaaaaagatagatagagatgacagatgaagagatggatggaaggcagataaagaggatggatgggtggaagatagagacaatgagtcaatgagtagaaggatggatggatggatagatagatgatagatagatagatagatagatagatagatagatagatagatacatagatagatagatgggcaggcaggcagggtctcttgggctaaggcaaggtttcctaccctccacactcaacatctggggctggctcactctctggggtggagaccattctctgtagggtattgagtagcatccctgccctccactcaccagaggccagaagtacccacccactcctttccccccacccaagtggtgacaaccaaaactgtctctagacattgccaagtgtcccctggcaggggcagaactgcccaagtgagaacccaagaaccactaagacaagaaaatgccactgactcactctagtcagtaaaagccatgtttctgtgatctcgcagggagaggcgcacctccttctccacgagcgacgtctccaagctcctcccgtccctggccaaggctcaggtaacaacaacacggcaaaaccccgtctccactaaaaatacaaaaatcagccaggcgtggtggcgcttgcctgtaaccccagctactcaggaggctgaggcgagagaatcgcttgaacgcagtggcagggtagaggttgtagtgagcctcgcgagaccaggccactgcactccagcctgggcaactagagtgagactccgtttcaaaaaaaaaaaaagcaggaagtgaggtcggtggatggagtgtaaatgcctgcaggggcttccccatctagcacaggactgccagcctttccttagcagccccccactgcaccgtcttgcagcctgcagcagaaaccacggacggagagcgaagtgcgaaaaagccagctgtccagaagaagaagccaggcgacgcatcctccctcccagacgcagggctgtccccgggctctcaggtcgactctaagtaagtattgggcttgggggaaactcaggccaccagaggatgcccggggtccctgccagggcctcgcagcagtgtggcctcctaaaccaatcacgtttacaaagcacgttcgcaaaggcatttgctcagtagaaactgaatggggaggccaggcagtggctcacgcctataatcccagcactttgggatgccgagacgggtggatcacttgaggtcaggagttggagaccaaccaggccaacatggtgaaaccccatctctactaaaaatacaaaaattagttgggcatgatggcaggcacctataatcccagccactcgggaggctgaggcaggagaatcgcttgaactcgggaggtggaggttgcagtgagctgagatcatgccactgcactccagcctgggtgacagagggagactccgtctcaaaaaaaaaaaaaaaaaaaaaaagcctctagggcaggatccttcctgcctcttctggcttttgggggctccaggtgttccttggcttgtggctccatcactctaatctctgtctctatcggcacttggccttcccctcagtgtctgtgtcttctgtcttctgtcccttaaaaggacacgtggctgaatggatgcagtaggtcacgcctgtaatctcaacactttgggaggccaaggtgggatgatcacttgaagccaggagttcaagatcagcctgggcagcgtggcaaaatcttgtctctgcaaaaaaatttcaaaaattagccaggcagggcggtgcatgcctgtagtcccagctactcaggaggctgaaacaggaggatcccttgaggccaagagatcaagcctgcagtgaactgtgatcataccactgcactccagcctgggcaagagaatgacactctgtctcaaaaaaactttttttttaacttaaaaagataatgagctaggcgcatggcttgtacctataatcccaacaactcaggaggctgaggtgagaggatcatgctcgtgaggccaggagtttgaggctgtagcgagctatgatcacaccactgcactccagactgagtcacaccccaactggaacaaaaagaaaagaaaatggagtccccctgtggcttctgtttggtatccttctttcttcacataactcccctgccagtacaaagaaagggctattgctctttataagataatcctgtgttgtttttttgtttgttttttttttgagacagaatcttgctctgttgcccagtctggcagtctggagtgcaatggctcaatctccgctcactgcagcctccacctctcaggctcaagcgattctcctgcctcagcctcccaagtagctgggagtacaggtgtgcaccaccatgcccagctaatttttttttctttttttttctttttttttttttttgtatttttggtacagaaggggtttcgctatgttgcccagcctggtctcaaactcctgggctcagctgatccacccacctcagcctgccaaagtgctgagattacataggcgtgagccaccatacccagccagatccatttttgtttttgttttttgtttttttttttgagacagagtctcactctgtcacccaggctggagtgcaatggtgcgatctcagctcactgcaacctgcaacctccacctcctgggttcaagcaattctcctgcctcaacctcccaagtagctgggactacaggaacccaccatcacgccctgctatttttttgtatttgtaatagagacagggttttgccatgttggccaggctggtctcaaactcctgacctcagatgatccacccgcctggatctcccaaagtgctgggattacaggcataagccaccatgccaggccagatccttttttgagtcaggcattgatagagcatttgccatgtgtccagtcacagggaggctgggcctcacgtccattttcatttcagacttaaaagaagccacgtactttctcctgcagatccacgtttaagaggctttttctgcataaaaccaaggataaaaaatacagcctggagggcgcagaggagctggagaatgcagtgtccgggcacgtggtgctggaagccaccaccatgaagaagggcctggaaggttggtagcctgcagcctcagggacagacagtagagccaccagtgcccctggggacattcactgtccccaaacggggccttgagttggctgtgggccaagccctaggcacagagccaggggtttctggccctggataaaggcgtgccataggaggtcccctgcatcctccccctgaacccaccctcaccggctgcttcctgtcccccctcagccccctccggacagcagcatcgccacgctgcaggtgagaagcgcaccaaggaaccaggaggcaaagggaagaagaaccgaaatgtcaagattgggaagatcacagtgtcagagaagtggcgggaatcggtgttccgccagatcaccaacgccaatgagctcaagtacctggacgagttcctgctcaacaaggtgggatcactaggcgagggccaggggcatgaggcccggtccccaggggaaccatcacagccaggcattgttttctgaaacacacaacacagggtttagcaggtcaagaatacaaagtccaggctcaggccggggacagtggttcatgtttgtcatcccagcactctgggaggctgagacaggagaatcacttgggcccagcagttcaaaaccagcctgggcaacagagagaccccatctctacaaaaggtttaaatattagctggagtggtggtgcacacctgtagtcccagctcctgggggctgaggcaggaagatcgcttgagcccaagaggtcgaggcaccacaagccacgatcgcagcactgcactccagcctgggtgacagagcaagaccctggctcaaaaaaaataataatgcatatttggtctcaaagcaaagattgatgaagcactgtgtgcaacagaagtggaggcgaacaagctgtggctgccctcaggagggttataccccgtgggggtggggggtgggcaatcctgcagcagatagagctacatttgggagctgcacagcgggcacagggggccgatggggacacagaaggatcaggaaaccctgctaggagtagaggcatcttgaaattaccaggccattccaggcatccccatcctaaggtatggctgggtgttgagcccctgtgtggggcagcaggaagggcctgaactgacctgtagctctcatctaggggggattctgtccgccagggaacactggcaatgtctggggacattggggttatcacagcctcaggggagggcgctgttggcatctggtgggtggaggccagggatgctgcttaacctgctgtggtacacagggcaggccccaatgtggagagtagtcctgccctcaatgtcagtggctttaactctgggttgacaagatgagagaccaggcttggccagagggactggattttatcccgagagcctaggggatgacttaagagaggatagaagtgaccccttgggcacctcctcgggtacgcaggtccccaggcctgaggcacgcagggtcagttcctctccccttccagataaatgacctccgttcccagaagacgcccattgagagcttgtttatcgaagccaccgagaagttcaggagcaacatcaaaacgatgtactctgtcccggtatgtggcggcccggccttcagcctttcccataccctgctcagacccgtcattcccatccgccccttgcccaggcctgcagggtgacgcctagcattcctacagaacgggaagatccacgtgggctacaaggatctgatggagaactaccagatcgtcgtcagcaacctggccactgagcgtggccagaaggacaccaacctggtcctcaacctcttccagtcactgctagatgagttcacccgtggctacaccaagaacgacttcgagccagtgaaggtgggcagcccagcatgccacgcccacctgtgacatgccacgcctacccatgcctcgccatccttagccacgcccacccatgcctcaccatgcttatgccacacccacccatgccctgcccataccacagccactgtgccatgacttgatccacttatgccatgcttacctgtgcctcaccatgatcacttatgccacacccacctgacatgccacacccacccatgccatgccacgcctatgacatgcaacatgctatgcctacccatcccttgccatgattacatgccatgcccacctataccatgccgtgcccatttgtgccacacctacctcctggtggggagccctgcaccctccccaacagagcctcacttctgggtctggggtgtctgaatgggggcgttagggacaatgatgccactccaggtgagggagggttcagggtacccacacgcctgagttatggggtgccaggggtgggttggggctcttcccaggggggcccccgccaacctcctccttgtgttcctcacagcagagcaaagctcagaagaagaagcggaagcaggagcgtgctgtgagtaggctgcacatagatgagagtccgagcaggcgaacattggcaggagcatgcacgtgtgtgtcagtgtcaatgtgcgcatgggcccgtctgcacgcgtatgtgtgcgtggacacgtgtgagtgtgtttttcccccggcatatacggagccgtagtcttgaataagtcacccctgagatcccatgggtcgtcatccaccagtggctggggagggctgccttcccctttccctgcccagcgccttcctctggcctcacaggtccaggagcacaacgggcacgtgttcgccagctaccaggttagcatcccgcagtcgtgcgagcagtgcctctcctatatctggctcatggacaaggccctgctctgcagcggtgagtggctcccccaccaggccccaaaaccctccatgtcccccaccacccctcactgctcaagaggtcttcagggccaggcggggtggctcacacctgtaatcccagcactttgggaggccgaggcaggtggataacgaggtcaggagtttgagaccagcctggccaagatggtgaaacctcatcactactaaaaatacaaaaattatctgggcacagtagtgggcacctgtaatcccagctactcgggaggctgaggcaggagaatcacttgaacctgggaggcgaaggttgcagtgagtcgagatcgcgccactgcaccctaacctgggcaacagagcaagactctgtctcaaaaaaaaaaaaaaaaaggtcttcaccccagcccagccaccaggtcagatctttctggaccgttgtcccagccatatcccaccccctcaaaccgtccaccatcaccggaggagcagagcccaattctcagctggccccaaggcccccagtagccagcacccacccacatctgcagcctcctctcctcgtgggccctgcctctctgtctctgtacacgctgctccaccgcctgaaccatcggcccctccttccccaggctcctcacggtccctcccctgtaggccagactcagccccaggggaccctaagagacagggcccaggaatgacccagctgatccatgctcacacagctttgatatggccaagtcagtacccaagcccaggcagcctccagaggcccagcagggtcaagagggcctctcctacatgtgtttttctgccagaaccatttgggccagggtcttttcagcccagaaggcagccccaccaccccacatctgtccaacagtcagttgtcatggtcctgagataaggatgcgggacccaggcccgtcccctcacctgattccatccttgccaggtgccagacactctcttctttagcgtaaccagtgtaccctctgcaaggcgtcagctgggtggcctgggattcagtgtggttggaagaaggaaaagcagcattgtctttgccccgtgacatcttcgtcccaagtccccaaggccacctcctggcaggacctttagacctttagttctgccagtaggtggccttggggacttggggcaaggatgtcacaggtccccacaaacacctgctcatggttccgctagccaggctgggtctgaggccatgaatggccaccttggagctatgaagtttgtccacacagcctcctctctcaggagtcagggcacaggttcctgcagtgtgggtttagaagttggcaggccaggcacagtggctcacacctgtaatcccagcactttgggaggctggggcgggagggtcgcttgaactcaggagttctaaatcaacctgggcaacatggcaagaccccatctatacaaaaaaaaatacagaaattagccaggcacggtggtgcacgcctgtagtgccagctacttgggaggatcacctgggcctgggaggtcaaggctccagtgagctatgatagtgccactgcactctagcctgggtgacagagtgagaccctgtctcaaaaagaaaaagagaaaccaaaaagaaggcaatccaggccaggtgcagtggcttacgcctctaatcccaacactttgggaggccgaggtgggcagatcacctgaggtcggtagttcgagaccagcctgaccagcatggagaaaccctgtcgctactaaaaatacaaaattagccaggcgtggtggcgcacacctgtaatcccagctactcgggaggccgaggcaggagaatcacttgaacccgggaggcggaggttgcagtgagccgagatcacgccattgcgctctagcctgagaacaagagtgagactccatctcaaaaaaaaaaaaaaaagaaggcaattggcggcccccggccagctgggtgggtggctgcaggaatctggggtccccagcaccctctgtgactcccaccctgtggacctcctagtgtgcaagatgacctgccacaagaagtgcgtgcacaagattcagagccactgctcctacacctacgggaggaaggtgagtgtacgaggcctggaactttctacaatgacactccactcacggccaggtgcaccaggaggtggtgcttgatgtgagggccaagcgaagcattgagcagccagtagggggcggctgtggcctctggttctgcagaacacaccattgtccccggttctgtacaaactccttgaggccctcaggcagggcccaggcctgtgtgtgtgtctcagctcccccagccctgctcatccttgctcctgagagagtcctgagccatgcagagggaggccccccaactctgtgcataaggttggggtcctgggtgctgggggtgcagcaagagtcagggtctacttctgtgaggtggctgtgggggctaggttatagctctctccccacgaaggaccacccatgccttgggtggcctacaaaggaagcccctgcccagtggctgccatgctggccttgacttctgcagccccacacccccaacaaccacgcagaaggagacagggagggacagaacagcagaggaagccctgagggccttgtgcgggaccaggaggcagaggcccccagagacagctggagaggaagacagccaggcccagacctgacccccaaccccggcactgcagggcgagccaggcgttgagcctggccacttcggcgtgtgcgtagacagcctgaccagcgacaaggcctcggtgcccatcgtgctggagaagctcctggaacacgtggagatgcacggcctgtacaccgagggcctctaccgcaagtcgggtgctgccaaccgcactcgggagctccggcaggcgctgcagacaggtgggcgctgtgggcaggtgggtgcagtgccaggccccaggcacagccgtcctgccagtgcgccgctcaccagacccaccccacccaccccacagaccccgcagcagtcaagctggagaacttccccatccacgccatcacaggggtgctgaagcagtggctgcgggagctgcccgagcccctcatgaccttcgcacagtacggcgacttcctccgagccgtcggtgagccccatggcggtgcgggtggcagcaggtggccacagccaggatacagcgttcgctgtgaccagcccaggaggcaggaccacccagttcacaaactgagaaactgaggcccaaagcagtcggcccagccaaaccgggtccccagtttggggtggggccaggacacctctgtagccatccattcttgcctgggcaccacagggtggatggcacctgtgcatctcaggtcgtgttggtggggacaacaggcaccttggggacccttgggagctgacgtcctcaaaccccactgcctgcagagctgccggagaagcaggagcagctggctgccatctatgccgtcctggagcaccttccagaagccaaccacaactccctggagagactcatcttccaccttgtcaagcaagtgcctccccacctgccctctgtggggttagggtcgcattgggaacccgcgaggcagcatttcccaggaggacccgagctggcgttctgtggtggtttcgaaccaggatgcagaccactgttgggggttctgggagggggccaggctgctgggccgcccgggtcccttgaggtacctctctgtgctgcggaagcatctcccagtgctgggctgtggcactgctttcccaacagccaccccagggctcagaagttcagtctcggggctccctggtacctccctccctcggccctagccatcctctaactgccagtggctgtgcagggtggccctgctcgaggatgtcaaccgcatgtcacctggggcgctggccattatcttcgcaccctgcctcctgcgctgccctgacaactcggacccgctgaccagcatgaaggacgtcctcaagatcaccacgtgagtgcccaccctgccccggaggcatgctcagggcagccccacccaggaccccacgacagctccatccatccctgtgtaaataaatgtgtaagaaaagtccagagccgagtgcagcggttcacacctgtaatcctagctactttgggaggccaaggcaagaggatcacttgaggccaggagttcgagaccagcctgggcaacatagcaagaccctacaaaaaatttgaaattggaaatttgtatttaaatataaaaatttaaatttccaaatttaaatttttaaattcaaatttttatttaaatataaaaatttaaatttttgtctctacaaaaaatttaaaaattaggccaggcgtggtggctcacacctgtaatcccagcactttgggagggcgaggtgggtggatcacttgaagccaggagtttgagaccagcctgaccaacatggtgagaccccatctctattaaaaatacaaaaattaggctggacgaggtggctcacgcctgtaatccagcactttgggagaccgagacgggcagatgacctgcggtcgggagttcgagacgagcctgaccaacatggagaaatcctgtctctactaaaaatgcaaaattagccgggcgtggtggcgcatgcctgtaatcccagctacttgggaggctgaggcaggagaatcacttgaatccaggaggcggaggttgcagtgagctgagatcatgccattgcactccagcctgggcaacaaaagcgaaactctatctcaaaaaaaaaaaacaaaatacaaaaattagccaggcctggtggcatgtgcctataatgccagctactgggaggtggaggctacattgagctgagatcgcaccactgcactccagctgggcaacagagtgagactccgtctcaaaaagaaaatttaaaaaaataaaaaatatatatataaactagccaggtgtggtggcaggcgcctgtaatcccagctactcgggaggctgaggcaggataattgcttgaacccaggaggtggaggttgcagtgagctgagatcacgccactgcactccagcctgggcgacagagcgagactccgtctcaaaaaaaaaaaaaaaatccagatggcagtggccccagcagttgtgtctttttgaatgtgctttaatgagcacaccccattgtactaaaacagaacttttttttttctttttgagacggagtctcactctgtctcccaggctggagtgcagtggcacgatctcggctcactgcaagctccgcctcccgggttcacgccattctcctgactcagcctcccaagtagctgggactacaggcgtccaccaccacgcccggctaattttttgtatttttagtagagacgaggtttcactatgttagccaggatgttctcgatctcctgaccttgtgatccgccgtgagccaccgcttccagcctaaaacagaacttttaacaaaggctggatgataggtgaatggtagtggattcctctctctgctacaaagcgtcctgtcacgggaggataaggaacaagcagcagcccctgcaggtcgcaccacagagctcacccaacctgagtccctctggtactgaccactccagactgagtccctctggtactgaccactccggactgagtccctctggtactggccactccgggctgagtccctctggtactgaccactcagggctgagtccctctggcactgaacactccgggctgagtccctctggtactgaccactccaagctgagtccctctggttctgaccactccaagctgagtccctctggttctgaccactccaagctgggtccctctgatactgaccactccaggctgagttcctcccaataatgaccactccaagctgagtccctctgacactgaccactccgagctgagaccctctgatactgacaacaccaggctggccttgaccaccaagtgggcatactgtgggtcagcccatgtctggagcccctggggccatctgcctattgcccctgggacaaactgcccagcagcttgtacttctctgcgaggcaggataattcccaccctactggtgactaaggggttcagttcactctgaccctccttcaaacaaggaggcgtgcagagacaggagacaggctcaaagaggtagagtgagctgccgaaggtcacactgcatgggagctggcacagccgtgtcccaggcactgcttggtctctgagcctcaaccactgccccccaggcaccagctagcatctccctggacctcagacgtccccggggcggtaactgagtcacttcctcccgtgggccttctctgtaggtgcgtggagatgctgatcaaggagcagatgaggaaatacaaagtgaagatggaggagatcagccaactggaggctgcagagagtatcgccttccgcaggctttcgctcctgcgacaaaatgctgtgagtaccggtgatcgtgggggcgggacctctttggtggggcggagcctggtgctgggcagggccttgggcgtggctttgttgctgggaaggctggtgagtggggtcttggtgggcggggccttgggtgggcaggacctcccatgccgaggatgggaccgggtagtgggtgtggtctcgggtagcagggcggggcctcccttcccagttccccgcccactcctaccacacccttggccacaaccagcctggctggggccaccaggccctgcaggtaggggcagacttactgccttgaacgaaagacgatggtcctcgctcagcctcactccaattatgttcctctaggtggggcaggtagggggaccagcttcctgcttgctggtggttcaggtcatgcgtccagccttgtcccttctgacctgggccctacccacggggaaatgttcccatagcagaagaatcagccccacagtgcaggggtgtgttagtggggaacgggctctgggctcctgtgggaaccagggaccccctatcttggtaccggtcattggatgtatccccagctcatgcctgtgtctgtcttggcccgtgtggtcaccctgtgttcatctctctcccagccatggcctctcaaactggggttttcgtctccctatgagggggtcctggtatgtacgcgttcggtgggcccgcggtgcatgtctcccggtgcagtgcatgctggggttccctggggccctgggcccctcgtaggatagacagagcctgtcctaaccttccggaagtgcatgctggggaggccccttgcctgctgaccttctgtgctcaggacgactaatcggccacatgaccaccactctgtcccatgggattcctagagaagtctcactaagagcccagcacactcacatcacaactaacctcctgggatctgctcacacctccggcagtaacctcgcccactcagagatgtcagtgggaccccttgcttctttgtttcagaacaagagccccaagacccgggacatccaggaggaggagctggaggtgctgctggaggaggaggcagccggcggcgatgaggaccgggaaaaggagattctcattgaacggatccagtccatcaaggaggagaagcaagtggctcagtcccctccctcagtccttcatgtttagggcaagctggagtgcaggttccatccctggtggtccgcttgacctcgccaggtttggtcctgtcatccctaacactgggcaaacaacactttttttttttttttttttttttttgagacggcgtctcgctctgtcgcccagctggagtgcagtggtgctatctcggctcactgcaacctccatctcccgggttcaagcgattctctgcctcagcctccgagtagctgggattacaggtgcccaccaccatgccctgctaattttgtgtttttaatagagacagggtttcaccacattggccaggctggtcttgaactcctgacctcaagtgatccacccaccttggcctcccaaagtgttgggattacaggcgtgagccaccgcactcggcctttatttctgagacagggtctttctctgtcacccaggctggattgcagtggtgcgatcacggttcactgcagccacaatcccctaggctcacggggtcctcccacctcagcctccccagtagccggaaccacaggtggtgcacaccaccacgcctggctaattttttttactttttgcagaacagggtccgcctatgttgcccaggctgggttcaaactcctgggctcaagcaatcctcctgcttggggtggggggaggttggggacacagagttacatctaggagcaggacagcctgctctgttccacactggcccagcacttccggtggggtggccttggacaccactaccctttttcctccagggaggacatcacctaccggctgccggagctggacccaaggggctcggacgaggagaacctggactcggagacgtcggccagcaccgagagcctgctggaggagcgggccgggcggggggcctcggaaggtcagtattaaggtagcgtctgcttttctccttcccgtccatcccagcaggccccagggcgagggtcctccggctgccggccctgaagctgcagtaaccctgccatctgtctctcaaaagggccccctgcgcctgctctcccttgccccggcgcgcccaccccgagccccctccccaccgtggccgcccctccacgacgaaggccgtcgtccttcgtaacggtcagagtgaagaccccccggcggacccccatcatgcccacggccaacatcaagctcccaccaggcctgccctcccacctgcctcgctgggcaccgggtgcccgggaggcggctgccccagtgcggcgccgggagccacctgcccgccgcccggaccagatacattccgtgtacatcacgcccggggcagacctgccagtgcagggcgccctggagcccctagaagaggatggccagccacctggggccaagcggaggtactcggatcccccaacgtactgcctgccccccgcctcgggccagaccaatggctgagagccacagctgacaaagtctgcatgtccgaggacggcccctgcactggagctgggcgccagagctgcagagctagtgttcggccctcagagaaggatccagaatcaaaagctcaagagtgacgtgaggtgggcaccggccccaagtgcagagtcaaggcagggagaggccggctggagccaggccccctcgcacgcagcccccaaatcatggacgcacctgtggggagcaccacatctccacctgcggcctcacatctccccactcccctttttgtacgtttaactgtttctttgtacgtggtttacgtaactttaaactgtaacagccttaatggaagaccaaatggttttttatatgtgtatgtacaaagttttctattaacgctgcccgtctcccttataacctggacgtgagctgtcagagcagaagccactaggccactgcgcgtctgaggctcagaccctgctgtggttggcttggggtggccaatgggctgggaccctccatgagagttttggacacttgggtcacctgacccgtgcctctctgacacatgtctccggggggcagccacctggccaatgtgcatttttgcacatgctggaaccttccatgggggtctgggctattggctggagccaggacatgagtcaggggcaccatggacctcacgtgccagggagacttgaatgtggctgtcactcttccggacgccaagggctgcaggaggctgcttttggcactacccaccccgtgtgacagaataggagccagcgactcaggactgctcacgggtcaggagggcaacgcctgaagtcagacctccctataggtcaacagggacaacctggggatctctggagcagggccctcctctctcaggcttggcccactcccccagacacctggacacgtggccacaaatctgggacaaggggcccccgcacagcatgaaataaaaagtgcctgagaagtgtgtgcatgggacgcctgctcatatgggatcgggcttggaagaacagggccggtgggtgggggtctgccctgtggcctcagccaagaagggtgcagaatatgggtggaacactgtcctcaaagttctgtcttgatcctccaccaaacagggagctcccagcagagcctcacttggccaggagcgcctgctgtcctggcagccctctctggcctccctgattcagtgcccagcctctggagcctaaatgtcagctgcagcagccacccatccagcagaggtggccagttcctggtgggcccagcaggacaggaacagatgggctcccaggctgccatcggatgggagtcgtgggaactggctggctggtattggttggggcaccgtgaagaacccaagttcagacagcacatgccagaggttgaggggcttctccaaggccacacagttgggaggggcatggctgggatttagactctgccctgccagcctctagaggcccctttgatgggccctgggtttggtctccattgtttgttgtgggtttttttcttgaaacacggtctcgctctgtcacccaggctggagtgcagtggcgcgatctcggcccactgcagcctccacctctcgggttcaagcgattctcctgcctcagcctcccgagtagctgggattacaggcacgcacaaccaagcccagctaatttttgtgttttttgatagagacagggtttcaccatgttggccaggctgctctccaaactcctgacctccagtgatccatccacctcaccctcccaaagtgctgggattacaggcgtgagccaccgcacctggccctccatggtattttctttttttttttttttttttgagacggagtcttgctttgttgcccaagctggagtgcagtggcacaatctcggctcactgcaacatccacctcctgggttcaagcgattctcctgcctcagtctcccaagtagctgggattacaggcacccaccatcacgcccggctaatttttgtatttttagtagagacggggtttcaccatgttggccaggctggtctcaaactcctgacctcaggtgatccatctgcctcagcctccctaagtgctgggattacaggtgtgagccaccgcacctacccgtctatgatatttttcaaggacatcaggcccactggtgtaaccaaggtgcagatgacctaaggtgtgggaaaacatgaaggctgcatgccaggccctggttcctgtgaagcccccaccctcatcctgtcactccagaagagaggcactgcaaggcataggggtactcagcttccaggtactgaggtgggctgggaaggggttctccatgggggtctgggcgttaggggggacccagccccaccttgctcactctcaggcagagctgtctcatgtgccccttgaggcaggtactgtcacactgtccatttcccgggggaagaagcggatccagaaaagttaaactctcccagggccgaggatggaatcagagctggagctgtgacctggaaacccataaccacaatacagatgagccctgctgaggtgggggaagccttggattcctgaatcccaggctacagaaatcgggaagggtgtgtggacgtgaaatagctccgactgggaagaatccaggtaggagtggggtgcggggaggtactttgagcaggcaaaacagaacaaaagggcacactgcacgcgggtctgacaccagaagaccccggtcgtcctatcattcccgaagggttaacatgctctcgaggaaaagcaagtgattcgcctaagtaagaatggggtggcgcctctcctatttttttaaaatagagatagagtagcgctatcttgcccgggctggcctcaagcaatcctttcccacctctgcctcctaaaatgctggcattacagccctgagccaccgcgcccggcccagcgccccgtctcaaaacaagatattacttccgctccaaacaaagatgggccagctaacgagcgcgggggaaacatccgcccggaaggccacttgaaggcacttccgccctctcttaacatggagccggcggaaggggtggtgtagggccgggcgataatggcggcgtcgaggctggagctaaacctggtgcggctgctatcccgctgcgaggcgatggcagcggagaaacgggacccggacgagtggcgcctggagaaggtgaggggatctcgcactgccgcgtagagcccgactcccggggggtgattcctagggttggaagccacctggcccgactccccggccccagtagcctctcgggcagcgccctttccggtcagtcccgccacgtccacctgtagcttccgcccccgtccctgggactccgcccctcccccactggccccgcctcctttacgcttgacccctcccatttgtcggccccgcccccccgactcccatgatcaggacatgggaaagacccccgggtgacaatccacttttcctccccagtacgtgggagccctagaggacatgttgcaggccctgaaggtccacgcgaggtgagtgcaggcagcctcagggctttcacatcagcacgtggctgtgctactggacatcccagtaccgctatcccagctgggacccttccctgagctggggaccatggacaggttttgtttttcttcttcctgccttccagcaaaccggcctctgaggtgatcaatgaatattcctggaaggtggattttctgaaggggatgctgcaagccgagaagctggtgagaaggggtgcccctgccccctcagcccccatcaccgctcactttggtccccaggacctgcccctccagtgacttatcttcccacatttctgcagacctcctcctcagagaaagcactggccaaccagttcctggcccctggccgtgtgccaaccacagccagagagcgagtgcccgccacaaagacggtgcatctgcagtcacgggcgcggtacaccagcgagatgcggagtgagctactaggcacggtagggctccttccctggtccctgggaatcccttggacaggaataggggttctatgcttgtaggcagccagaaccacaatactgtcagatacaggaaccctaagggggtccagcaatctcttccctgggtcatcacacaaggctgcccaacagaggggcattgtggctaaggctttgctagatgaataggaatttggtacaaggcaaaaatggaatgtgtctggttaagccccagagttggcccaagagcagggtttgagtcctggcttgcaacttacaagacacataagtttcttcagccgtaaaagaggatgacaagttcctttctgagcactttatgtggatcagctcaatcttttaaaatatgagttgttgtggccaggtgcggcagctcacgcctgtaatcccagcactttgggaggccgaggcgggcggatcatttgaggtcaggagttaagaccagcctgaccaacatggagaaaccccgtctttagtaaaaatacaaaattagctgggcatggtggctcacgcctgtaatcccagctactcgggaggctgaggcaggagaatcgcttgaacccaggaggcagaggttgcggtgagctgagatcaagccattgcactccagcctgggcaataagagtgaaactccgtctcaaaaaaaaaaaatatgagttgtcgttaccagtttaaggttgaggaaacaggctcagaggtcatgggatttccccatgtcctgactgaaggtgaggaggttgaggtcagaagggacaggtttgggaacaagacaaggggggtgacttcatggcatttacttttttttttttttttgcgatggagattcgctcttgttgcccaggctagagtgtggtggcgcgatctcggctcactgcaacctccgcctcccaggttcaagcaatactcctgcctcagcctcccaagtcactaggatcacaggcacccccaccacacctggctaactttttgtatttttagtagagatggaatttcattatgttggccaggctggtctcgaacttctgacctcaggtgatctgcccaccttggcctcccaaagtgctgggagtgagccactgcacccagcctcatgccacttacttctttccacaggactctgcaggtgagtcaccatgaacacaacaggacttgagggccagctgactaggacaagacatgtatccttgctgccccggggcctccatgccgagactccatgccctgactccaacaggagcatcaccaaactacacctggaggaagagccaggacagaggaaatggccccgagaggaaacaaagctaggcacagtggctcacacctgtaatttcggaggctgaggcaggtggatcacctgaggtcaggagtttgagaccaacctggccaacatgacaaaaccatgtctctactaaaaatacaaaacttagccggatgcagtgccacgtgtctgtagtcccagctactcgggaggctgaggcaggagaattgcttgaacccaggaggtggaggttgcaatgagctgagatcacaccactgcactccagccggggcgacagagcaagactccgtctcaaaaaaaaaaaaagcaaaaaaattagccaggcgtggtgacgcacacctgtagtcccagcatacttgggaggctgaggcaggaggattgcttgagcctgggaggtagaggttgcagtgagctgagattgcgccagtgcactccagcctagttgacagagagagactctgtctcaaaaataagcaaataaataaattttttaaagctaggcactcccagcctatgggaccaaggctaggctggagggagggacctggggtctgagggaaccgagacaggagtaaggagaccctcctagaagagggggtattcaagcatggtcagaagccaacggggcagcagacaagatgaggaaacagcattccaagcagtagacccagcacaggcaatgctcaggatgccggaaacgggaaaccaacactcgccttttttgcttggcctgttttgctttcagagcctgagatggacgtaaggaagagaacgtgagtgtctgcggccctggggcagtagtggcaattgggcggtgcggcagggacggggtagcagtggccaaaccctggaccaccgaggcactaccacaaggatctaaaccaaccagaagccacttctgtggatgctcttcccagaagtcaaaggccaggcgcagtggctcacgcctgtaatcccaatactttgggaggctgaggcaggcagatcacctgaggccaggagttcaagaccagtctggccaacatggcaaaaccctgtctctactaaaaatacaaaaaattagccgggcatggtggcatgcgcctgtagtcccagctactcaggaggctgaggcaggagaactgcttgaacctgggaggtggaggttacagtgagccgagatcacgccattgcactccagcctgggtgacagagcgagatgctgtctcaaaaaaaaaaaaaaaaaaaaggtcgggcgcggtggctcacgcctgtaatcccagcactttgggaggccgaggcaggtggatcacgaggtcaggggttcgagaccaccctgaccaacatggtgaaaccctgtctctactaaaaatacaaaaattagctgtgcatggtggcaggtgcctgtaatcccagctactcaggagactgaggcaggagaattgcttgaacctgggaggcagaggttgcagtgagccgagatcatgccactgcactccagcctgggcaacagaacgagactctgtatcaaaaaaaaaaaaaaagaaaatgtgttggtcttctcccctttcccactccatctctcatgtcctcctccccccgtgtgtgaaatcagtggagtggcagggtcccagccagtgagtgagaagcagttggcagctgagctagacctcgtcctgcagcgacatcagaacctccaggaaaagctggcggaagagatgctaggactggcccggagcctcaagaccaataccctggccgcccagagtgtcatcaagaaggacaaccaggtgtggggactgggggagctctccagcctctgccctggggcatcagagaaggcttcccagcacaggagcattgtggctggggctttgcgggatgaataggagtttcgtagaaggcaaaaatggcattcccagcagagggcacagcaccagcaagcgacaagaggtgcaggccagtcccagggaagtagagagaggccattcttggccccagtcctgttgacaccttttccacctcccccacagaccctgtcacactcactgaaaatggcggaccagaacctggagaaactgaagacggagtcagagcgtctggagcagcacacgcagaagtcagtcaactggctgctctgggccatgctcattatcgtctgcttcatcttcattagcatgatcctcttcattcgaatcatgcctaaactcaaataaagacccccgcccaccttgtctgtcttccgtctgtcccctgcccccatctagcagtgcctttcaggctggccaatgagatgggagggtttttggaggtccctgaagagccacagacagacagtgcatgagcaggggaagaaccacctcagggccagatgcgggggctcacgcctggaatcccagcactttgggagtccaaggcaggtggatcacttgaggccaggagttcaagaccagcctggccaacatggtgaaaccccgtctctaccaaaaaatacaaaaatcaggcaggcatggtggcgcacgcctgtagtcccagctacttgggaggcttaggcacgagaatcacttgaacccaggaggtggaggttgcagtgagctgagatcccagtactgcactccaacctgagcaacagagcgagactccattgcaaaaaaaaaaaaaaaaagattctaaaaagaaaaagtcagtcttggcaggtggtgactcatcaaacgctgcctccgcccatgttcctctggagcctaccccacaatggacgaggcccagccccaggaggccctaggagcctccgactggcagacttgtagccgaacacagtgccttcagcgatgtaaggccagggtgaggccaaagggcagaacaggggcttggagggtcggggaggagtggggccatgacaggagctcagcctggaggagggcgcatcaacacgaggtcttccctggaattaaaggcaatagttcaaggacacagctcagccacactgcagcctcagctctcgggacactacagatccctcacagtcactcgacaaacacacatgggtcgtgcccagtgctcactggagactctgccctccccaggtcacagtctgatcacttcaaaggagaactgggtgagtactagggtaggggtcctgaaaagggtcgtggagtaggaattctggggtcctgagccctgctctcacaccagctccagacagggcacagcctgtgagagcaactgagggggctcagtgacgagggcttggggtgtctgccccatggcagcattgacggcattgtggggacacttggaggtgcccagtggacccccactgacgtgggtgtaaaatccttaggtagggttgtgtggttttttttgttttgttttgtttttgagacagggtctcgctctgtggcccaggctacggtgcagtagtgcaatcatagctcactgcagcctcgacctccaggcctcaagcaatcctcctgccttggcctcacaaagtgctgggattacaggcatgagccactgtgctcagcccaagtagagatttttaaaagtgctactggcagcttttaaaaagtagaacatagagccaggcgtggtggctcatgcctgtaatcccagcactttgggaggctgaggcgggcggatcacctgaggtcaggagttcgagaccagcctggccaacatggtgaaaacccatgtctactaaaagtacaaaaaattagctgggcatggtggtgggcacctgtaataccagctacttgggaggctgaggcaggagaattgcttgaacccaggaggcggaggttgcagtgagccgagatcacgccactgcactacagcctgggcgacaagagcgagactccatctcaaaaaaaaaaaaaaaaaaaaaaaaaagatcataagaaggagacagccaggcatggtgactcacgcctgtaatcctagctactggggagtctgaggcaggaggaccccttgagcccagggactggaggctacggtgagcagtgatcatgctactgcactccagcctgggtgacagagtaagacccctactcaaaaaaaaaaaaaaaaaaaaaaggaagtttatgcctgagacacagggatgattccttattagaaagccacgttggccagggcaccgtggctcacaccttgtaatgccagcactgtgggaggctgaggtgggaggaccacttgagctcaggagtttaaggccagtctgggcaacatggtaaaaccctgtctctacaaaaaatactaccagctacttgggaggctgagacaggagaatggcttgagcccaggagttcgaggatgcagtgagctgtgatcacaccactacactcctgcctgggtgacagagccagaccctgtctcaaacaacaacaaaagccagctacattaatgcctcagaaaacaaaatcacagatgctgaaatgacaaattgtactgtttagcctccgttacccaaagtctcctaatttaaaaagaaaggaaatagatggacatgttcctcacttcactgaaaaatctcaagccaaagggagcattgactttaatgggcaaatactcaaaacttctgccatcaaaatgaggaataggccaggtgcggtggctaaagccacctgtaaccccagcactttgggaggccaagataggcagatcacttgagctcaggagttcgacaccggcctgaccaatatggtgaaacctggtctctacaaaaatacaaaaattagccaggcatggtggcacgcacctgtaatcccagctactcagaaggctgaggcaggagaatcacttgaactcaggaggcagaagttgcagtgagccaagatcgcaccactacactccaccctgggtaacagaatgagactccatctgaaaaaacaaaaacaaaaaaacggggggaatggaatggggaaggatgcttacagtcgccctgcctccataatgtaacatagtcttgaggtggtagtcagcacaactagacgaaaaaaagaggctgggtgcggtggctcacgcctgtaatcccagcactttgggaggccgaggcgggtggatctagaggtcaggaggtcgagaccatcctggctaacacggtgaaaccccgtctctactaaaaatacaaaaaaaaaattagccgggcatggtagcgggcacctgtagtcccagctactcgggaggctgaggcaggagaacggcgtgaacccaggaggcagagcttgcagtgagccaagatagcgccactgcagtccagcctgggcaaaagagcgagacttcgtctcaaaaaaaaaaaaaaagaaaaaaaaagaaaaaaagaaatggggccaaatatggtggtgcacgcctgtggtcccagatacttcaaaggctgaggcaggaggattgcttgaggccagaagatagagactagcctgggcaacaatagcaagaccctgtcaatagaataaataaaatgccaggcatggtggctcatgtctttagtctcaactacttgggaggctgaagcaggaggactgcttgagcctaggagtttaagacctgactgggcaacatagcgagaccccatctctaccaataaaaatttaaaaattatccaggtgtaggccacctggttggctcaccaggccacactggccaagatggtagaaccctgtctctactaaaaatacaaaaattagccaggcatggtggcgggcacctgtaatcccagctactcaagaggctgagccaggagaattgcttggcccaggaggcggaggtagcagtgaaccgagatcacaccactgcactccagcctgggagacagagcaagactccgtctaaaaaaaaaaaattatccaggtgtggtggtgcgtgcctatagtaccaattattcaggaggctgaggcaaatgatcacttgagcccaggagcccaagtgatcatgctgcactgagctatgatcgtgccactgcactccagactgtgcaacacggtgagaccccatctctaaaacaaacaacaagaaaaaaagaaatgagattgaaaaataagagaagaaaaataagaaatgagaaggcaaaattatttgcagatgatatgaccgtatatatgataggcccaagcgatgtgactaaaaatatttcaataaaagaattccttaagctagcaagagacttatagatatttaaaaattcatttcttgtatactatatatgtatatagctttaaaatgtattaaagcatcccatttatagcagcaataaaaaaagatacactgcctgcttaaacgaattttgttgacatttgaagaactttttttggagtcgcccaggctggagtggtacagcagcacaatcgtggctcactgcaacctccgcctcccggtttcaagtgatctcctgcctcagcctcctgagtagctgggattacaggtgtgtgctaccatgcctggctaatttttgtatttttagtagagacggggtttcaccatgctggccaggctggtcttgaactcctgacctcaagtggtccacccacctcggcctcccagagtgctgggattacaggcataagccaccttgcccggctgacatttgaagaacttctaaaaatcaacaagaaaaaacatttgcaggatataacaggaaaagaattacgaaatagagaaatagtctctaaattttttcactcatacactaggcaatatttccttttttttgagacagtctctcaactgtcatccaggctggagtgcactggcgcaatcttggctcactgcaacctctgcctcccgggttcaagcgattctcctgcctcagcctcccaagtagctgggattacaggcgcccgccgtcacacctggctaattttttatatttttagtagagacggggtttcactatgttggccaggctggtctcgaactcctgaccttgtgatccgcccgcctcggcctctcaaagtgttaggattacaggcgtgagccaccgcgcctagccttagtaggcaatattttcaactttgaaagtacaggtgaggggccagcgctgtggctcacgcctgtaatcccagcacgctgggaggccgaggcaggcggatcacgaggtcaggagatcgagaccatcctggctaacacggtgaaacctcgtctctactaaaaaatagaaaaaattagccgggcgtggtggtgggcgcctgtagtcccagctactcaggaggctgaggcaggagaatggtttgaaccctggaggcggagcttgcagtgagccgagatcgcgccactgtactccagcctaggagacagagcgagactccgtctcaaaaaaaaaaaaaaaagaaaagaaagtacaggtgagggaatccgttatcatgccagtgccgccaaggttgtgggaaaacccctgtatctcttggagcataaatggtacaatctcactaaggagtaacttggcagtatgttccaaatgtaaaatacacacatcccagacaggaggctgaggcaggaggatcgcttgagtccaggagttggaaaacagcctggacccataaggacatttcctctcaaaaaaaaaaaaaaaaaaaaaaaaaaaaaatgccaagcacgattatgggatcacacctgtaatcccagcactgtgggaggctgaggcgggtggattgctggaactcgggagttcaagaccagcctgagcaacgcggcgagatcccgtctctacaaaaaacacaaaaattagggaggcgttgtgtcacctgtggttccagctatttgggaggctgaggtggaaggatcaattgaggctaggaaggaggtcgaggccacagtgagccatgatcatgccctccagcctgggcaacacagcctctctctctctctctctctatatatatatatataaaaggccgatttggggcacactgtctataagttagctctgctctgccaggaacagtactgttcagtaaagatgccatctaacaccacctgctcgcccttaaaagaaataaaagaaaaagaaagaaaggggcgggtgcggtggctcacgcctgtaacccagcactttgggaggccgaggcaagcggattgcttgagtcccggaagctgttcaagaccagcctggctaaaatgacgaaactccgggcgggcgcggtggctcacacctgtaatcccagcactttgggaggccgaggcggacggatcacttgacgtcagaagtttgagaccagcctggccaatgtggcgaaaccccgtctctactaaaaatacaaacaacaacaacagcaaaaaattagctgggcgtggaagtgtgcgcatgtagtcccagctactcgggagccggaggcaggagaaccgcttgaacccgggaggcggaggctgcagtgagccgagatcacgccactgcattccagcctgggcaagtgagactcttgttaaaaaatttttttcatataattgctgaaaaaaataaataagtttaaatttgcaaaaccatcccgttttttcagacaaacttgagggtcgaggtcggagtcgaccatgtttcgaaggtgtgtggccacgcccagccaggtcagccccgcccccaggccgtcaggcccagccccctttcgtcagaccccgcccccagccctgctgagcgaccccgccagtcgggtccatcctgcagtaaatgcacaacccggacggaagtgcctctccgacagcagatccaggctcggagctccagacgctgggacaggtgacccggggcggtagcgagccggacggccttgcaggtggggcggaggtcccgaggagctcctcgggcgcggtcgtctgtgggctctgcgcgccctggaggtcgaggctccggcagcgcgggggttaactcgagccggtcccaggctgcgcggcgacgtcagagttcatttacatagcgcttatttgggttgcgcagtcgtgggcggggtctggacgtcgctgcggaccaatcgcgtgcgtctatgcaaatagcggtcgttctggggaactctgctcccgcggggtgagagttggccgctcttcggccgagctgcccgcgcgtcctttctccgtgcgcgtcgtcaggcgtgtcctctccgcgtgtccacccacaggccgcccgcagaccacccccgccgcgcgcgggacacgacgccccccgcaggacccgcccatcagcccggaaacccctgagctgcttctcccggaggccgatgcccacccgggagcccccaaagactcgcggctcccgggggcacctgcatactcacccgcctgggcctgggcccccggtgagcctgaccgggagggggtccccaggccgggcctctaggcaaaagatttagcccctccagtttgagggactccggtttcccgacaccccgatttaactccagaccacgattcctgtggcagctgcagggactggcgccccgaggcctcaaaaccagcgccccccgccctccgtgccagccccagccgggaccccacaaggcaaagaccaagaagattgtgtttgaggatgagttgctctcccaggccctcctgggcgccaagaagcctattggagccatccctaaggggcataagcctaggccccacccagtgcccgactatgagctgtgagtgtcccccatgtgattcttcatgcctgggatcaggagaggggcactgaggctggggctttgatagttgaataagagtttaccaaagagtagaaaggaaaggatcccttgctgatcagtagtgggattgtccctgtgaataagccactgcactccagcctgggcaacacagtgagatcccgtctccgaaaataaataaataaataggcgaggcgcggtggctcatgcctgtaatcccagcactttgggaggctgaggcaggcggatcacctgaggtcaggagttcgagaccagcccggccaacattgtgaaaccccgtctctactaaaaacacaaaaattagctggatatagtggcgcatgcctgtaatcccagctactgaagaggctgaggtgggagaattgcttgaacccgggaggtggaggttgcagtgagctgagatcgctacactgcactccagcctggacaacagagcaagactctatctcaaaaaataataataaataaattaaaagagggagagaaaaggaacgtttctagtaggggcccagcatggacaaagaaaagcaaattacactgactgggggaaagagtggggttctttacactcacactctgaccctcttcaacctggtagtaagtacccgccagtgagcagtgagagggaacggagccgctatgtcgcagtgttccaggaccagtacggagagttcttggagctccagcacgaggtggggtgtgcacaggcaaagctcaggcagctggaggccctgctgagctccctgcccccaccccaaagccaggtcagcactagggagaaagccctgccccgcagcccttctgagtggcccgacccaagcctctgggacacccactgggtccagatttccaggactctttctcctctcggttggctgggcgccgtgacacatggctaaggtcagcccttgaagtccccactagatgggcatttagtctgtctgagcctcagtttcttcatcccttcttgaattcaactctccctaaaccccctttctactcctccccttgcagaaggaggcccaagttgcagcccgggtttggagggagtttgagatgaagcgaatggtgagtcttgcatcccacagcttggtcttgcacccctgagacttctgtgaggctggggtgcctgtgcccagtttcttttttttttctttcttttgagacagaatctcgctctgtcacccaggcgggagtgcagtggtatgatctcagctcactgcaacctcagcgtcccgggttcaagcggttctcctgcctcagctgggatcacaggcgcccaccaccgtgcctggcaaatttttgtatttgtagtagagatggggtttcaccatgttggccaggctggtctcgaactcctgacctcaagtgatccgcccacctcggcctcccagactgctgggattacaggcatgagccaccttgcccggctcacccggtcgcctgtgcccagtttcaaggagagaaaattgaggctcggagaatgaaaggcagagagttaagcagcttgaaggccacagggcagactgctgcaaagacttccgggtctcgccctgcctaggatcctggcttcctggacaagcaggctcgctgccactacctgaagggtaaactgaggcatctcaagactcagatccagaaattcgatgaccaaggagacagcgagggctccgtgtacttctaagtgcccctgcagatgggcagagggatgcatggggatgcaggtcccttgcatttcttggtatctctcagcttttcctcttgcagctccccctaccaggggtcgctttctcctggattgcaaatgcctcttcagtttggactcagctctgacagcccctcctccaggaaggccttccaggacttcctcctctgggtcctctagctctgaccctacagggactccagatctcaacctgttccctggaagtagggcctgctctccatcccagtgaaataaacatgtattagacacctactgagtataattacttaacacttctgatttcactcagttgtcacacacacaaaaagttgttttttgtttttgtttttgtttgagactgtgtctcactctgtcgcccaggctggagtgcagtggcacgatcttggctcactgcaacctccgcctccccggttcaagtgattctcctgcctcagcctcccaagtagctgggattacagacacctgccaccatgcccaactaattttcatatttttagtagagacggggtttcaccatgttggccaggctggactggaactcctgacctcaagtgatccgcccacctcagcctccaaaagtgctggggttacaggcatgagccaccacgtccagctggattcttcactctctgtgtctccctgggcacttcaggacagcaactgaccccagtgtgtgggcacggtccatatgcatggcctagggggaggctcttccagtgtctgacccatcccaggccctagctgtgatgggtggggcacaggtggggccagtctccctgtgggagccatgtaacagcagaccagaagctgtcctctgagtttcagtctcccaagggagccacaggggcaagaagcaaccaggaagaccaactacatgcaggggagacagcgtcaaccactgggccaccacgattgtcctcaagaaggccctagtctggggaagatagccctgagtccagtaaaagaaggctgcacagcagagtcttaatagccagggaggctcaagatctcttcccgcaggaagggccatgtgggtagggttttgtaggaaaagtaggagttcagcagtcaggccttggacagacatccagatctctggcctggggccaaacagcaggacagacaccatggtctcactcaaccctcagatgtcctgtgcattggataaatgagaccttgctgtccagtttgactggagtagacatggacccactcactcacaggacaccatggagagaccctgacctaatgcaaaacccagtgcagccttcaacgagaacctggtgtcctctccatcccgcccctgcctcagttcccttctgggaacgtgcccacaagaaaccctcactgactccacaggaggggcctaatctctcgtcttccaaggctttcttcaagatggacatggggagactagggagcattttggcaaactggggctgcttaagagctgagcactggcccagcaggcagcgtgacagacttgacttcttcccttgctgttttcaggagggcatctttcttttttttttttttttcagacagtcttcctctgttgcccagagtggagtgtagtggtgcgatctcagctcactgcaacctccgccttccaggttcaagtgattctcgtgcctgagtctcccgagtagctgggattacaggctcctgccaccacgcctggctacagaaggacatcagtgagaggtgccacccccaccaccattcgggccctttctctctgccctacagctctggtgctgaattccacaggtgcctttcccaccacagagctgtgccacacactcccgaggctgggacgggagagtccctggtaccccacatgattccgtatcaacccagtgaagcccacatttcaaagtcttggccttgtaggtgcctgactcccaaacgtcaatctctgaaacagatttttagttccatgtgagaaaaaaaactgaagtcagattgactcaggcacaaaaggggggagactgagttcacagaacttaaaacacccaagggtttcaggtatggcttgatctggggctccaaaggcatcttgggaaattgatcttccatccttggctctgctttaattagattctcccagttccaaatcccaccgtgcaatctcactggctagtttggcatcccagggcctccataaaccagttgctgtggcccagggaatggtggtctctgattggctcgccttacatcatgtgacaggactggccccagaggtttctcccaaggacattggagcccaaacaagattaagggcccggcagctcatgcctataatcacaccactttgggaggccaaggcaggtggatcacctgtcaggagttcgagaccagcctggccaacatggcaaaacccctctagttaaggtacaaaaatcagctgaacgtggtggtgcgcacctgtaatcccaactactcaggaggctgaggcaggagaattgctccaactcgggaggcagaggttgcactgagccaagattgcaccactgcactccagcccaggtgaaacagcgaaactccatctcaaaaaaaaaaaaaaaaaaaaaaaaaaagattaaggttgaccaaaagaaagtaagtgaggctaggcacagtggctcacgcttgtaatccacttttggaggcctcaggtgcatcacctgaggtcaggagttcgagaccaacctggtcaacatggtgaaaccccatctctaccaaaaataaaattagctgggcatcgtggtgggtgcctgtagttccagctactggggaggctgaggcaggagaatcgcttgaacctgtgaggcagaggttacagtgagccaagatcacgccactgcactccagcctgggtgacgaagtaggactccgtctcaaaaataaaaaataaaaataaagaccagggaggctgtgcaggtaggaaatgtctttattattggccttgagtcatcatgtagtgtctgacataggttacgtgtccagaggatctgcctggcacacgctagctacccctgcccactggagcagcccctctggccgacgccaggcctttgtccatcatgccagggaagccaaccccaccatcccacaagttcatgctaggggtgctgaggaacaaggctgtcctaggattggaccctccatcctggacaggggtcctggggaggatgaggctgaggcctggatgatcagtctctttttggtttcatgatcatttaaaaaacagaaaagacaaacatttcacagtctttaaaaaatagaagtctgaggagagaagccagagtcctgggccccgggaggcccctcgaggcctcagcattccctgtcccttgaggtctgtctgcaggcctggccacagcacacgtggccccgtcatggtcactggcccgagccgtagggccagttgaaggtactccccgacagcagcatgtctctgatcagtgtctcaatgggcgtcttccccaccaggcgcatgaagaacagctgggagatgagggaggcagggaccgcgcgcagggcggggagccgcagcagcaggcgcccgaagcgctggggctgggacgggtactgcgcccgcacatactcggtgagggccacctgcgccttctcctgcaggctctcaacgtgggccgggtctgagaggccacaggcgtctagggggacaaaggcaagtcagacaggtgggaggcagctagagaacacagagcccacaggggtgactaggggacaccactcgccactgtgggtaagaacagggggccgggcatgatggctcacggccacagtcccagcactttgggaggccaaggcagaagcatcatttaaggccaggatttgagaccagccagggcaacatagtatgatcccttctctgcaaaaacaaatcagctggggctgggcacagtagctcacgcctgtaatcccagcactttgggaggctgaggcaggtggatcacttgaggtcaggagttcaagaccagcctggccaacatgatgatattccgtctctactaaaaataagaataattagccaggcatggtagtgcgtgcctgcagttccagctactcggaaggctaatgggaggatcgcttgagcctgggaggcggaggttgcagtgagccgagatcgtgccactgcactccagcctgggcaacagagggagaccctgtctcaaaataaataaaaaataaaaattagtccagtgtgatggcacacgcttgtagtcccagctcctcaagaggctgaggtgggaggatctcttgagcctaggagtttgaggctacagtgatccatgatcatagcacagcctgggcgacagagtaataagaccctgtctcaaacaaaacaaaacaaaacaaaacaaaacaaaacaaaaaacgaccctgggatgcaaatgggactatctaagactgtgtcgatcctccagagatagtgaggtgttctcatctaaccagtgacataggggtgcaggcagtgatgtttcaagggtggctggcacccaactcatgcctttggcagggagacaggttctaatttttttttctttaagatagagtctcacactgtcgcccaggctgaagtgtagtggcacgatctcactgcaacctctgcctccgggttcaagtgattctcctgccgcagcctcacaagtagctggcattacaggcacactccaccacgcctagctaatttttgtatttttagtagagacgggttttgctgtgttggccaggctggtcttgaactcctgacctcaagcaatctccccacctcggcctcccaaagtgctgggattacagggccaccagccaggccaaggagatgggttctaaggaagctcgcagggaaggtggggctgggaagggaatttgatgaggaagacagagcccagaagggcctacggtgtgagagaatgtggcagcctctagagagagacccaagataggaagccaagaagaaatctgggaaggccaggcgcggtggctcacgcctgtaatcccagcactttgggaggctgaggcgggcagatcatgaggtcaggagttcgagatcagcctgaccaacatgatgaaaccccgtctctactaaaaacacaaaaattagccaggcgtggtgacgcgtgcctgtaatcccagctactcaggaggctgaggcaggagaatagcttgaaccagggaggcggaggttgcagtgagccgagatcgtgctactgcactccagcctgggcgacggagtaagactccgtctcaaaaaaaaaaaaaaaaaatcttctgggaaaacaataaataaagccatatttattgatttttgagacgcggtctcactctgttgcgcaggctcaagtgcagtgggaaaatcagagctcactggagcctcgaactcctgggctcaagtggttctcccaactctgcttcctaaagtgcggtgattacaggcctgagccaccttgcaggcccaaaaccatatttatcaaatgaaagccacctcccagagtagcctggatctggttcctagccccaaagatacctctgatgggatctagagacttccagtaggttaaagaactcccaggagacaggctggagagatctttgtctaaaggcatggtggcttatgcctgtaatcctagcactttgggtggctgaggcaggactggttgcgcccagaagctcaagaccagcctaggcaacacggtgagaccacgtctctacagaaaacgtttaaaaaaaaattagccgggaatggtggtgcacgcctgtggtcccagctactcaagaggctgaagtgtgagggaggattgcttgagccctggagatcaaggctgcagtgaaccgtgttcggacaactgcactccagcctgggtgacagggtgagacccagtctcaaaaaatggaaatacaaataaaaaaataaagtggaaaaaaaaaatttggctgtaccgccagtcgctggaatacgatgggctaccactgctagatagctgatggttaagaaagttctggggttgccccgcccctcaacgggaggggcctccgagccacgcccctacccagatccctacaaccctggctacctggaggttgccctgggagcccagtgggggcctgagggggccagaaccagggggtcaggaccttccctcccacgtccccccaaccttgtgctatcagtgctcactaagcctgaagagccctttggtgagggagtaggggtctcagggagcctgggaacaggaagagggttctggggtctgggccctggtcctggcccagccttgggtctggggtccggggttcagagttctccgagagtcctgggatcacggagtgggggtgtcacagtgtcacactgcttacatcacccctctacagccacccaagagcgttcactcacggcgcgtgcagggccccaggcctagggagcgagcggggcgctatgggggccggagtctgggtccaggccgccctcctcctaacctcccttgggtccccccatcccgcggccctcttcggagcgtggctcaccgggcgtgaagagcgcgatggccttgaggcagccatactcggccgagtcgacctgcaggcggcccagcttgtccacctgctcctggaaggcgcgcacctggtccatgaaagccacggcgcgctcggcggccataggcgcggcgtggaggccggcggcggccagtagcggcgccgtgtgcaggggcagcgccgcctgcgccgcgttcagcacgaagagctcgctccagctcaggcgcagcagcgccacctggtcggccaccggcagctcggggaagaagggcgcgtggcgcgcccactccacggtgctgaagagcagccgcgccgccagctcgcacacgttgtcgatgcccagcaccgcgcccgccgcgccgccccctgcgccgaagcgtccggccgccgcagggtagggctcagcgcgcagcagctgcgcgatcagttcggacaccggctgccccgggaagaggtctccgccgctcgccactgccgccagcgccgagcccggggggctgcccgaggaggcggccacggcaccaggcagcgagtgcgggatgcggccgcgctgcaccgctgcgggaggcggggacaggagggacatgggggcgggaggggaggcggggggggggggggcgggcagcaggaaacgggggagggacaggagatgggggaggggagggcggggcacagaaggccgggaggagaggagattggagagacaggaagggaagcgaggggtagagaggagagggccggaagaggggggatgaggggccaagtaggtgcccatagagacatggggtggggggcaggtgggggggggcaggtagggagaataacgggaaagggagacaaaagtcatcaaggggtcactcaggccctcccctccaaagcctccaggcccagcctttcccagaatgcccaaccccaccccatgggcgccaggctggttagaaagtaagagtccaggagtccctgtctaggtccagccaccaccccccacccccagctcctggggacaaggaggagcatctaataaaccttttggagcctcctaacagatagtcatggggttcccagagctgaggatgggccatggaggacttggggaccctggccagcttggtccccaaagcaacagatcaatacccacccagcactggctctctcctatggaacagggatcatttctctaccttccatccccctccccaccagatggtgacccctgagggccggtctgggtccctgcagaggctacagtgcagggaagggttgggggggacctacagtaaggaggggtcccaggggggctgccataggtcctcagtaaacattagccgccatcagtagccttgcttatgaagcggggaggccctgctgctggcttgggcacgtctgcagtgaccaggtgggtgagaaaagggaaactgaggcatgaagaggaagagagttggccatgtgcctgcctggcttgtgccggggtgggcgggatggcagggctgactgggctggttgccagcagactaattaatgagctttaatgagctggcatgccccatctcatcacctccgtgaactccaggtcaactctgtgtagagcaaacaccggaggggaacgcgagcagaagccaggggcgaacagagctaagcggagaagccagggcatgggttgaagcccgctccaaggggtccctgagtctgagtcaactgtcaaatggggataggtggatggggcccaaaagtggttccccggtcctccaggaagcttcctcccgctttgttcactgggttgtgagcaaccaccactccctcacatggccacattcccaccccagggcctttgaactttttctttttcttttttccctccctccctcccttctttcctttcctttcttcctctctctctctctccctctctctctctctctttttgagatagagttctgctctgtcaccaggctggagtgcagtggcacaatctcagctcactgcagcctccgactccggggttcgagtgattctcctgcctcagcctcccgagtagctgggattagaggcacctgccaccacgcctggctaatttttgtatttttagtagagacggggtttcaccatgttggccaggatggtctcaatctcctgacctcgtgatctgcccacctcggcctcccaaagtgctgggattacaggcgtgagcccccacgcctggccggcctttgcactttctgttcactcttcctcaaacccctccccagctcttcagcccagactgtggaggttcaaatcccaatcacaactctgttgctctctgacaaatggcctcaccaatctgctgtgtgcctcagtttcctcatctgtaaaatgcagacagtggctcccatttgcaagcctagcactttgggaggctgaggcaggaagatcgcttgagcccaggagtttgagaccagcctgggcaacatagcgagaccccgtctctacaaaaaattaagaaattagcccagcatggtagcgaacacctgtaatctcagctactcaggaggctgaggtgggagaatcacttcaacccaggagtttaaggctgcagtgagctatgatcgcaccactgcactccagacagagtgagaccccgtctcaaaaacgatgtcaccaatcactgaattaaatgagaatctataccttaaaataatgcctgccacacaggaaaggtaattacatggtaattcaagccaaggaccatttattgaacacctactgtgtaccaagccctggtctaggcgctggggaacaagacagacaaaaatacctgcccacagggaatggacattctgggtgtaagcaaattacagaacaagacaggtggcgtcaaatacagggggatcaggagggcttccctgaggaggtgatgtttgagcaaaccttgaaggcaaggttagggagggagccatgtatggacctggaaaaagtgcactccaggcagagggaagagcccgtgcaaaggacccgaggcaggtgtgcttaaagcatgagctgtcatcataaatatttccacccgaggcttttggagacttctggcgaggctgtttgctctgaggccatgacttgagatatatgaggattttaggtaaaatagacaagtagaggcaaaatccatgttatgggggcagggacaagaaagttacccccaaacttaaaagggccacagggagtgatcagttttaaaagaaagcccctcagctgcctctctcagcttctcccaccaaggcctagaccaaaaaacaacagctttacgccaagtatggtggctcattcctgtaatcccagtagtttgggaggccaaggtgggagggtcgcttcaagctaggagttcgagaccagcctgggcaacatagtgggactctgtctctagaaaataaaaaaagctgccgggtggggtggctcatgcctataatccgagcactttgggaggctgaggcgagcggatcacctggggtcaggagttggagactccagcctggccaacacggtgaaacaccatctctattaaaaatacaaaaattaggccaggcgcggtgactcacgcctgtaatcccaacactttgggaggccgaggcgggcagatcacgagatcaggagatcgagaccatcctggccaacatagtgaaactccatctctattaaaaatacaaaaattagctgggcgtggtggcatgtgcctgtaatcccagctactcaggaggctgaggcaggagaatcgcttgaaccagggagtcagaggttgcagtgagccgagatggcaccacagcactccagcctggcaacagagcgagactctgtctcaaaaacaaaacaaaacaaaatacaaaaattaggtgggcgtgccgggcgcggtggcttacgcctgtaatcccagcactttgggaggctgaggcaggcagatcacgaggtcaggagatcgagaccatcctggctaacatggtgaaaccccgtctctactaaaaatacaaaaatatccgggcgagatggcaggcgcctgtagtcccagctactccggaggctgaggcaggagaatggcgtgaacccagggggcggagcctgcagtgagccgagatcatgccactgcactccagcctgggcgacagagcaagactcagtctcagaaaaaaaaaaaaaattagctgggcgtgttggcccgtatctgtagtcccagctactcgggaggctgaggcaggacaatcacttgaacccgggaggcggaggctgcagtgagctgagatcacaccactgcactccagcctggaagatggagcgagactccatctcaaataaaaataaaaataaataaagaaaataaggaaaaaaaaacttcaaagcaggggaggctcaggttagacattagaaagaactgccagcctggcccacgacacagtccccagaggaacctgaaacccagcacaggagatctcgtccaataggctagattctattcctgaaccccagaaatccatgcagaaatctctgggttctacttgaattctaagggggtttggcagagttctaggcccagcagcccagaatacgcccgtccacctgggtcccctgagcagagacagctgggcctcactcttgctcccagcgcccggggtcagaagaaagggtaagctgccctttgccttaatcgggcagagttcctgccttgggcaaacaaaaagcatgggtgaagggtggaggagaaacaaatcaaataaaaaaaaaaatccttgttcagaacgcggtggccgcgctagcagacaagaggtcaccaaggtgtcagggccagggaactggcctctgaggctggagtcgggggtaattggggaaggcagctcctgcaagagaatggggctggggaaagtcccttgtggggcgtccctggcctcttcagctccacggcagcaaccagggggccacggatcctaattggattcctccagcctagggccagactgcagcccacgggatcaagggatcagtggtaatgaggttagcaggcgccggcccccaccctgtgaggcacccagacccctgtgaaagggaggggtgaaagggaggggaaaaaggggaggaagaagctgtttgttcaccccggctccagcggctgtgatcgtccccagtgtgtccccagcacgtactcaccctccttcctcatgcccacccggaagcacttcttgagacggcagtactggcactggttccggtggtgctggtcgatctggcagtcacggttggacctgggggcacacagaagccagggctccctgagacccccatatcctcctccccgaaccagcctatgagccgcctttggaggctgcccctcagaaatactagtaggggccctctagactggagaggtagccccaaaggggtacaggagctcagcttgcaggtctgcaaaccagacaggataacccggatgagtggtgatggatgaagaggaatctgtggaaaagcagatgaacaccccagggagggcacattggcatgggttttgaaggatgaataggagttctccaggtgaatggcggggtgatcccagagagagggtacagccagagcaaaagggttgaaatacacaaatatggaggcctaaagagtttcattttatttggtcactgtcaggctgagcagggtcattgtccccaaaaagatgtgaaggcaaagaggacatggtcagagagctggactttgtgaattaactaggggtcaggccaggggctagtggtctgtggggtcatagcattgtggggccccagcattatcacccgcacaatgcccaccccaaggaatgaggaagtaaacaaagtcactctggtcctcagccctgaaggccccacacctacgctcttccgagaggaccacccaacccctatgcaagctggagattttcctggtcagccctcagtgaatgccgttgcctcttgcagggatgagacaggtggccccaccctgagaggtggtgagctccccatcctgggtcagcccccaagcaggaaggtccaggccttattcttcaaatgtccccagaaccttctccccttggcccctgcccttggactcccctggtctcttgccaccaggagctgggggctctccaaggcctgggcctggagcaactacccctggggttccagctggacacccaggggacacacagagacagtcacagagtagaaccaccacttaagggaattaaacagatgcatctctgcagtggctcacgcctgtaatcccagcactttgggaggcgggggagggtggatcacctgaggtcagttcaagaccagcctggccaacatggtgaaaccccgtctctactaaaaatacaaaaatgagctgggcgtggtggcgcatgcctgtaatcccagctacttggcaggctgaggaaggagaatcgcttgaactggggaggtggaggttgcagtgagccaagattgacccactgcattccagccagggtgacagagtgagactctgtctcaaaaaaaaagaaaaaaaaaaaggctgggtgcagtggctcatgcctgtaatcccagcactttgggaggccgaggcgggcggatcacctgaggttgggagtttgagaccagcctgaacaacatagagaaaacctgtctctactaaaaatacaaaattagccgggcatggtggcgcatgcctgtaatcccagctatttgggaggctgaggcaggagaaccgcttgaacccgggaggcagaggttgcagtgagttgagatcacgccatcgcactccagcctgggcaacaagagtgaaactccgtctcaaaaacaaaacaaaacaaaacaaaacagatgaatctcagctgcagatacccagccctgcccctcaggtggcgactgccccactgagcctcggtttcctcatctgaaaatgggaggtcagatattgccctatcatatgggatggactgggtcagaggggttcacgggggacagtgccaagacccagagcccagccggagaacccaacttaggaaagctgaggatctgcgcccactcccccgtaccccccctccaccactgcctgggtcctgcagcaccagccactgagcccctgggaagaggccccactagggcagagggagctcaggcagaaccagaacaaagcccagcggctgggtggtgggagggtccagggcagccgggtggaaacggcctggcctggggcggccctgcaggcaggcagaggcccagctcaggggcccctgacctcaggggaggccctgaaccttcagtctcaacttccccagctgtggaattgggacagatccatccctccaaggagggaaacagttaagttcttcctgttatcccacctaaagagtgcaagcttttttgcccaaccccatggcccaactcagcttcctccctgggcttctggcctccagtccaatttgatcagagccctctcctgctcacacaccctctatggctccccattaccctcagccagcatttcaggcccacctagctctgacttctcccatggctgcacagtccccctcttacagcacagctcccccagtctgccactaagtgttttgtctggaccacattctggcatgtccctgtggcctttcttccacctgccaactccatgcttcaaggctcatgtcccctagcctcctccaggcagccctctctgacctccaggcagagcctctgctctctccctgggaccccagatcccacagacttggggcatctgtctcactgtgtctcctccagactgggggcttctcaggagctagacttggagctggggtctctctggaggggctggcatcaaactacccaggctgggccccagcgagaccctgctcaatccatttgaagctcagaatggaatggtgatttcaccaggtcacacaactgacacagcacaaacctgtcagctccaagcaaggccccccccacccaaaattgctgctccctgacaccaccctcaggaagctcctgggaccccaaaactgcctgagcccccctcccttaccctccctaaagatatgaccagagagcaggcggttttccagcagcaagaatgaggccaaagtctagtggcccactttgtgctggaggagggagcaaggcagctctgccacacatggccacaccaggccagccctgacccgggacctggggccaaactccaccctcgggtacctggggccctatttggtggcctcagccaacaagccttccatcagccgttctccctggggccactccgatccgaactcagcggtccccaccctagccccacagttcccccacagtgcccccaactcgggcagcgtccctccatgtccaacgcaaagcaggcaccaggacctctctctgggcctttgggcctctgttttgggcagctgggaactgagaccgtctagacgggctccacagagaccctgcatgttcctggggtgcagagtaggggcttataaacggacagatcggatgctcgcccgggaacggtgagaaaagaactcccgggctggacaaccccgatcgctttccctggggaccttccgccagaacagctagcaaggccacgccctgccagagaggtctccgacctgggacagcccaaggctcctgctcggaaacgtttcactccctgcccgtctcagagacacccaaagtttgagggatttttccaggagccccaggtctgcacccacccctgggggagagggacgtttcagtcaattccggtggccctgccggccttccagtggcgatttccggtgacccaaggcccagagtgagcccagaggggttccctgagatgggcaagcccagctcccacccccacccccaccgctgggcccctcatgcgaagaaggccgccccgtgccaccccagcctccctccgtctgccgcctccgtagccacagcgactttggaagtgatatttgaccccaagggcgcgccgtatcgatccgcgcggccgcagacaatggcccctggacgctgcgagctccacggtccaagttccacgttcgattccctcgagggcatcccgcgcgccgggatccccgagaacgggtgccctggggttgggttaccacccctgacagcacccctacccccaccccagcgcggagatgacccctccccagagaaaaagcggagggaaggagaagcaagtaactggggcaaaagcctccagggaccacctgatggggggggaacctgcaacgatgtagcgccgactgtatacacaatcccagccatggaatgcgggaggagggtgctgtgcccctatctcagagggggcagtggaggcccagggaaggtcagcgccaggcccaaggtgaccgagcaggtcagaggcctgccccaggtcggggcggggtgcacggcggcggcgcgcggatggggggctcaccggcaggtgtagctgaggttgcggcggatgcttcgcttgaaaaagctcttgcagccctcgcaggtgaagacaccgtaatgcttgccgctcgacttgtccccgcacaccacgcagtccacctgcagccccggccgctcctcgtcgcccggctcggcgtcgctggcggcaccggggggcgaggccgagtcgtcctcggccgcgcgcgggtagccgcccgccttgtccacgccgttcgtgtcgccgccggggccgccccagccgccggtcaccatggccatagccccagggcagcggggccggggcgcccccaccgcgctcttccctccgggcacccctctcggcccgggggaccctacgcggcgcgcattcggccccggcgcgcggggggcacgggctgcaccccccaaaaaagttttgcagcaacttcctgcggccggtcctcgcgcccgggcggaactggtcgggccggttccaggccaactttcccacgcgtgcgcggggccgggcccggggccgggaggggcacgctagaggcgcgggccgggggcccagaggactcgcgtcccgccgccctggggccccggcgggggcgcgcgggccatggcccggcccgagccgcgcagggggcgtcctctggcctggccgccgctcgcccgggggctgcggccaactcagcgggccgccatccgagcgcgggaggccggggggaaagtttggccgcaagttgcgcggccgcccgtggcggggggggaggggcggcgggtgcgcgccggggctgatcgccgcgccccctgggtcccccggcgcccgcggctgccgctccgggcctgcagggccgctgggccggcgcctctggagctgccgcccccgctgcggccgctcctgcctggcctgggcctgcgcctgggcccaagcctcgctctcgccgccgccaccgccaccgaccccgcgcgccggcctcgcgctgcggccggtttgacacacagcgttccattcgcggggcgggcggggggcgggggcgggggcaggggcgcgcgccgcgggctgggggcgggcgctcgttgccccggcgacggccgcccttataagggcatgggtggccgcgcgcggcgccgggcgaacgggccggcgggagggacgggggccgagcgctgggccgcggggcctgaccctcccccgcctccctctgcccctccccccgcacccccgccctcgccctcgcccagctcgggccttaacccctgccgggccgcggcgggagcctcagccgcgcctgccctctgcccttccttgagcctcgccaagatgtctctccaaggccctcccctccacctctggccttggacgttgggtcgctcgatcaccctcgaggcgcccctcggaacctctccccaccccacagttcctggcaaagcaatgatggggggccagtggcacccggggggggggtacgcccctgcgcaagacacacgcgcgcgcgagacagacagacacacacacacacacacacacacacacacacacacacaccctagattgtgtttgcttcctcttccagaaagtcgccgcgtctgacccccaccccaccctttctctgctcgggttaacacctggtgcccggaatctccagggggaagggatgttgtggtctgagaccggctggccggggccgcgaggtcagggggcccctctgcagaatttctggcctccgggggcagggcgcccacccgccccgcgcggctggaggcgacaggcatgccctgtctgggggcctgcccctttttcccttttaatttccttttctttctgtgctttgcagaaagggcttggcctggcggccggctggactgcagatgtctcttccaggcgccctggagcctcgcagctgccgccacctccaactcaccccatcccccagtaccggggctggggcccgcccgaccagcatttattaagcaccctttgtatgcgaggcccgggctggcgagcctctggctctgggcaggttaacctttaaccggctggacaagcccttccaggagtgacctttcacctcggagtcttgcagccccagccacccagactgtggtcccaccccgccctgagcccagagctggacaccagagcatgcagctgggcctctgagagctctggccaggacagtgccttctgcgcaccccctcctctgcctcccagagccctgatgagacttgaagaattgccctccctggagtagggggaaagattcttagagatcttacaacacttaaaaagaaactgaggttctgggagagccaggcacacccagccctgggcctctcaacctgctccagggacgttctggctgcctgggaggtggaggaggaggcgttagtaaacacgaaaagcaggaaggactaggattagacatgagcaaggacttcccgaggtctagagtcgggttctgcccacagcctgatgtaatccctgctgggagagaggaaggcgtgggtgggcagagacgaccctttggttctgaggctgcatgggaatgtgactggtaatttgggatgagggcagggatcctaggccccttgcctggacctgctaggatctttggtggggagcattggggtggaggtctcagaagggattgaaaagagatttagatgagagacaggcgctgtggctcacgcctgtaatcccaacactttgggaggccaagtcaggaggatctcttgagaccaggagttcaagaccagccggggcaataaagtgagacccgtcttgagcccaggtgttcaaggctgcagtgggttataatcacgtcacgtcactccactccagcgtgagcaagaccctgtctcaaaaaaaaaaaaaaaaagaagagggagagaagactcaaggaatcttgaggggattgtgaaggggagggagcaaagaactaggtttgggggagacaagtcttgcgaggcagctgagagctgggtgggagatgggggaagaaagaccatcgcagatcccagaaactccagtagttccagtcccaaaggctgccccacccccttccagtagcctggccacccctgtgccccctggggcccgcctgggggtggatcaaggctctaccccgcctccctgacccctgcccgcggccctgcagtaacatttgaccttgcggcggccgcaaaccagggacaaaggggcctaggcccatctgctgagggggcacccgtgggaatggccagatcctgctggggcagcctgggaacctgtctccgtcctcccacatgtgaccttggctccctttgcccctccacaggcaacctggtgggaccaggaactcaggtcttagactctggggctcggcagggtacagggaagaaattcagcttctctgccccaccccaacacgagcaaggtggtctgcctccatttccctgctttcttcaaagttggcccaagtccagggacagcgtgtgggtcggaaggtgactagccccagccctcgctggaggggactgtgctcgccaccatacttcttgttctgtttctggggtcaggttgactggattcaagtccaggccgctgactggcgctgacctcaggctgacgtggtcctgccctgggagaggcggtgaacacacctgcacaggtgaggcctggagcacctgcccccaaggctgggaatgaaagtctttctaatccctgtctcgggtttcagctgccaccctgaagggggacagctggccactaatccaagcttggctgggtcgttccaagctcccctttcccagactcagccagtcctggtgtggaggggcagggagatgtgacttatgcaaatgacatgctaattcattgcctgctattaacctgacacgtcccacagctcctgggcccccaggagaaagctggaactggccaccattggcattcattctgagtttctcttgaagtacaacgccccctgagtcccagactattacctttgctatgcctgtcccccacccagaaaccctttaccttattttatttatttatttttgagacagactctcctattttgcctaggctggtcttaaacccctgggctcaagcagtcctcctccctcggcctcctgagatactgggattacaggcaagctcgaccacatggagtccagaaacccttgaccttagctttgagttagtagcaactcgtcatccacaccctgaatctgaaccattccagcttcagtctccctcctttttgttttgttttgtgttttatttatttatttagagacagagttttgctcttattgcccgggcacgatcttgttgttggcgcgatctcggttcactgcaacccccgcctctcaggttcaagcaattatcctgcctcagtctcccgagtagccgggattacaggcatgtgccacaacacccagccaatttttgtatttttagtagagacgggggtttcaccatgttggccaagctggtctcaagctcctgacctcaggtgatcctccccgcctcagcctcccaaagtgctgggattacaggcatgagtcaccacgcctggcctgtttttttttttgagacaaggtcttactctgtgacccagactggagtgcagtggcgtgatctcagctcactgcaacctccacttcccaagctcaagttaccctcccactttagcctcctaaatatctttataggcacatgccaccacgcctggctaatttttgtatttttttgtagaaatggggttttgccatgttgcccaggctggtcttgaactcctgggctcaagtgatctacccaccttggcctcccaaaatgctgggattacagatgtgcaccactgagcccggcccccttcaggaaaatctgccagccaaacccagcatctccctgggaaggggctgccaggagaagctctgtccagtccccatgaatccctccctgggcttcgggagacaggccagttggaacttcagctgtggctatgcaacctcacggacccccgaaatgcgtcagtcccagggacctggtcccatagcccaggttgcttctggcctgaccccactgatatgaagttcacattccacttggtgccaggccaaagacacctgagtctttcttcattgcctggccacaccccatcaggccctggacacccatgtgcaccagcttccctcacgccaaatgtgccccaacatgccaaatcatgcaacatgacatgatgtcactccaggacagtttatgacatgccacagctgtctggcatgtccagacatggctgggtaaggggcctacagaaaggtgtccccaagctggggaggcgggaggggaggcctgggcttccccagggcccttgcagtggcttcgagcaccgccacctcctcggcctgctgagcctccatgagtgccatctgctgctccaacttccggcgttgctcttcctgcttccggtgggctcctcggaaggccaggaccagggcgctggaaggggtgggtggctgggtcaggaaacagcccccgagtccacccaaggcaagggccgtgtactcccactcccagaatgggggctctttcacattgggtctccaagggtcccagctagctggtcttttgttgttgttgttgttgttgtttgagacagaatttcgcgcttgtcacccaggctggagtgcaatggtaagatctcccctcactacaacctctgcctcgagggttcaagtgattctcctgccttagcctcccaagtagctgggattacaggcgcccaccaccacgcccagctaatttttttgtattttttaatagagacagggtttgaccatgttgcccagactggtcttgaactcctgacctcaggtgatccgcctgcctcagcctcccaaagtgctgggattacaggcgtgagccaccatgcccagcctgttttttcttgttgttgttttttgagatggggtttcgctcttgttgcccaggctggagtgcaatggcacaatctcggctcactgcaacctctgcctcccgggttcaagcgattctcctgcctcagcctaccgagtagctgggatcacaggcatgcgccaccacgcctggctaattttgtatttttagtagagatggggtttctccatgttggtcaggctggtctcgaactcccgacctcaggtgatctgcccaccttggcctcccaaagtgctgggatttcaggcgtgagccactgcgcctggcccagcctgttgtttttttttttttttttttagacagagtcttgctctgtcacccaagctggagtgcagtggtgtgatctctgctcaccacaacctccacctcctgggtttaagcaattctcctgtctctcaagtagctggaattacaggcacgtgcaaagacgcctagctaatttttgtatttttagtagagatggggtttcaccacgttggccaggctggtctcaaactcctgacctcaagtgatctgctggcctcagcctcccaacatgctgggattacaggtgtgagccaccacacctgaccgttactgcctatcttggggcagtggggaatgctaaggcccagagacagccagggatacttctgatatcctggtgggggatggtgccagggggattggggggatgcagaacagtcctacctgtgggctttgcataaatccctgttcagctcggcactctgagaccgtctggctcgccccttctgagccacctgttccagctccctgcgcagagactgcagctgctcctgcaggtccagtgtcctgttgcgaaggagaagagagggggctcacagccccagccgatcctgtttcccaggtctcctcctacccacctgcccacagtattgtcatgtaaacacacctgtacaccggggtacaccttagcttctactgcagacgacacccccgggggctctcacataggctgcctgcccaccccccgcacagcccaggacccaggcacacacctggtgagcgatgctgccagttcctgggctaacttctctgggtcccaggctctgcccacctggccaccatcaatgccactggtgccaccagggacagcaggaaggccctaagggaggcagaagacaagaaagtgacattaacctaggccaagtccgtgcttggcccacactggacattggagctgcccagacagtggcagctgctgtgctctcagagacccacatctggttcgatataccaataagagcaaaattatactctgataagggaaatatcctatttaattaaaaaaaattttttttgagacagagtctcactctgccacccaggctggagtacagtggcacgatcttggctgacagcaacctccgcctcccaggttcaagcgattctcctgcctcagcctcccaagtagttgggattacagacacatgccaccagacccggctacttttcgtatttttagtagagacggagtttcaccatgttggccaggctggtctcgaacctcatctctaaaaataaaatttaggggccaggtgtggtagctcatgcctgtaatcccagcactttgggaggccaagacgggtggatcacttgaggtcaggcgttcaagaccagcctggtcaacatggtgaaaccctgtctctactaaaaatataaaaattagtctggcatggtggcagacccctgtaattccagctacttgggaggctaaggcaggagaatcgcttgaacttgggaggcggaggttgcagtgagccaagatcatgccactgcactccagcctgggcaacagagtaagatacggtctcaaaaaaaaaaattagccaggcatggtggcgggcacctggagtcccaactaactgggcggctgaggcaggagaatcacttgaagctgggaggcagaggttggagtaagctgggatcgcagcactgcactctagcctgagcaacacagtgagactctgtctcaaaaaaaaaaacaacaaaaaaacaaaaacaaaaactagagatccactggaagtccttcctcctgtctaatccttgtttgaaataataataattttttttttgagaagagtctcgctctgtcgcccaggctagagtgcactggcgtgatctcagctcactgccagctctgcctcccgggttcacgccattctcctgcctcagcctcccgagtagctgggactacaggcgcccgccaccatccccagctaattttttgtatttttagtagagacagggtttcaccgtgttagcgaggatggtctcgatctcctgacctcgtgatccgcccaactcggcctcccaaagtgctaagattacaggctgggattacaggcatgagccatcgtgcccggacagtaataatttttttttctttttttttttttgagacggagtctcgtcgcccaggctggagtgcagtggcgcaatctcggctcactgcaacctccacccctccaggtttaagcaattctctgtctcagcctctggagtagctgggattacaggcacgtgccaccatgcccagctaatttttttgtatttttagtagagacagggtttcaccatgttggccaggctggtcttgaactcctgacctcatgatccacccgcctcggcctcccaaagtgctgggattacaggtgtgagccaccgtgcctggccaataataattttttaaaaattaggctggacgtggtggctcacgtctgtaatcccagcactttgggaggccgagacgggcggatcagcctgaggtcaggagtttgagagcagcctggccaacatggtgaaaccctgtcactactaaaaatacaaaaattagctgggtgtggtggtgcacgcctgtaattccagctactcgggaagccaaagcaggagaatcgcttgaacctgggacgcagagattgcagtgagccaagatcgcaccactgcactccagcctgggtgacagagcaagatccgtttcccaaaaaaaaaaaaaaagaaaaaaaaaattaaaggccaggcgctgtggctcatggctgtaatcccagtactttgggaggctgaggtgggcagatcacctgaggtcaggagttctacaccagcctggccaacatggtgaaaccccatctctactaaaaaatacaaaaattggccaggcacggtggctcacgcctgtaatcccagcactttgggaggctgaggcaggtggatcacaaggtcaggagatcgagaccatcttggctaacacaatgaaaccccgtctctactaaaaaaatacaaaaaaaattagccgggtgtggtggcgggcgcctgtagtcccagctactcggcaggcggaggcaggagaatggcgtgaacccgggaggcggagcttgcagtgagccgagattgcaccactgcactccagcctgggctacagagcgacactctgcctcaaaaaaaataaaaaataataataaataagccgggtgcagtggctcaagcctgtaatcccaacactttgggaggctgaggcgggcgcatcacctgaggttcagagttcgagaccagccttagtaacatggggaaacctcatctacactaaaaatacaaaaattagccgggcgtggtggcgcgtgcctgtagtcccagctactcaggaggctgaggcaggagaatcacttgaacccaggaggtggaggttgtggtaagccaagatcgggccattgcactccagcctgggcaacaagagcaaaactctgtctcaaaaaaaaaaaaaagagatgaggtctcgctgtgtggcccaggctggagtgaaatgacataatcgtggctcgctgaagcctccaactccgggttcaagtgatcctcccacctcagccacccgagtagctgggaccactgtgataagggaaataaataacaggaaaccgcatctgaagtcactccaggagggcttccttgaggaggtgatgtctaagctgagatctacaggaggtcgaggactttatgacacaaagagggaagtgaccggtgttcctggcagggacacagaatatacaaaggcttggaggtaggagagatgatttaaagagctgcattaaggacaggtgcggcgactcatgcctgtaatctcagcactttgggaggtggaggcaggcgaaacatttgaggccaggagttcgagagcagcctggctaacatggtgaactgcaactctacaaaactgcatctctacaaaacatacaaaaaatagctagatgtggtggtgcgtgtctgtaatcccagctactcaggaggctgagacaggagaatctcttgaacctgggaggcggaggttgtggtgagccgagattgcaacattgcattccagcctgggcaacaagagccaaactccgtctcaaaaaaaacaaaaaaaaaaaggctgtgattgacaagggctatgttctcattagtaagctactcccctaccaggttcaggcagggcagctcacctgataccactcttcctcgtccccgctgctgccacctccgctgctatgtccgccactgctgtttgccccaccagcctggagctctgcccgttcccaccgcagctgctccagcaggagcacgtgagctggacccagggctcggagggcagcctcccgcagctctaggccccgcttctcacgccgcaccagctgcagccgaagcatcaggtccgccagggcctcctgtgggaccaaggagaggggagagaatttatgcttctacggtcaactgcagggaaactgaggccccaagaggcacccactgaggactattcagacaaaaactgtgacttttggccaggcgcagtggctcatgcctgtaatcccagcactttgggaggccaaagtgggtggattacctgaggtcaggagttcgagacgagcctggccaacatggtgaaaacccgtctccattaaaaatacaaaaattagccaggtgtggtggtgcacacccgtaatcccagctacttgggaggctgaggcaggagaatcacttgaacccggcagtggggcagaggctgcagtgagccaagatagcgccacagcactccagcctgggtgagagcaagactccgtctcaaaaaacaaacaaacaaacaaacaaactaggaccttcaccattcaccatgttcttgtgaggtggaaatatcttcctcccataaaagctacagctgtagaaatggcatttcctagaggggcaagtagcttacataggtcaagtattagttctgtcaaagcttctggagtttctctaactccagaacctcaagtttttcatgccaagctacaaacccaagattgtgttctttgctcccatctcttcccataggaagggcattttggagagccagatttgtagtctaatgagaaactgaaccccagaaaacaaactcctattaatccctcaaaaccccagctccaattctcccttcacaatgcctgcactcagcccagcagaattctcctttgctccttggtcccccgacctcagtaaaggattttgtcccaccaagaaagactgacacagtggccacagcccatttgtacccttgcggccaccaggtcctgctgaatttgtgtcttctccagtcggggaagagctgggccagcctgggtccccagaatggcctgcaccatggcttctgcacggggcacagtgggcatgggtgccaaggtggggccaggctctgagagaatcttcattagagaacggcgctcctggagacgctggacatagcttcggagctggaaagccacttcctgtggggtgggcttatccacactgctgccttcagggctatagaaaacagaaaaggtgcctatgtcaacactggcaggcataggtgggttaagttcatgccaatcctggtagggtccatcaccttccatctcactggccacgatggaatctatgccatctttggtggtccctgtcacaccaacataccccactaggcaccaccttccatcaagaccacatggtggccaggtgcggtgatgcatgcctgtaaccccagcactttgggaggctgaggtgggaggattgcttgaagccagaagtttgagaccagcataggcaacagagtgagaatccgtcttttttttttttttttttgagacgcagtcttgctctgtcgcccaggctggagtgcagtggcataacctcggctcactgcaagctccacctctcgggttcacgccattctcctgtctcagcctcccaagaaggtaggactacaggcgcttgccaccacgcccggctaatttttttttttttttttggatttttagtagagacgaggtttcaccgtgttagccaggatggtctcgatctcctgaccttgtgatctgcccacctcggcctcccaaagtgctgggattacaggcgtgagccaccgcgcctggccgagaatccgtcttcataaaaaattagctgcggccgggcgcagtgcctaacgcctgtaatcccagcactttgggaggccgaggcaagtggatcacctgaggtcaggagttcgagaccagcctgaccaatatggagaaaccccgtctctactaaaaattcaaaattagccgggtgtggtagtgggagcctgtaatcccagctactcgggaggctgaggcaggagaatcccttgaacccgggaggcagaggttgcagtgagccgagatcggaccattggactctagcctgggcgacaaaagtgaaactctgtctcaaaaaaaaaaaaaaaaaaaaaaaagacagggtctcactctgtcacccaggctggagtgcagtggtgcaatctcagctcactgcagcctccacctcccagactcaaggcatcctcccacctcagcctcccaagtagctggtactacgcgggcacaccaccatgcccagctaatttgtttgtagttttggtagagaaggactttcgccatgttacaagggctggtcttgaactactgagctcaaacgatctgcctgcctcggcctcccaaagtgctgggattacaggcttgagccactgtgcccggctgtgggtgccagttttaaccagtaggcattgtcattcatcttcatgccaactgcaatgtctgtcaaccaccatgccaactttgtcaagtagcaacaggccaactgcagttgagcctcatgtcaaccaactacagtgagctccataccgaccttgctggacacagccacaccaagccccgaaacgtggtgagctctgggagccccatcccccagtcaagaccccactcctcaaccaggccagttcccagggttccaggggggtaccttggctgtggattctgctgtgctcctgcatccatggcagcctcctcttgtgccagcagcctccatgcttccttttcagctgcttgcaggtcactcatgggggcttcgtctcctgctcctgagtcggcctcccgcagagcaagcagaaccctgtatgcctcttcacagtgttcactgtgggacactggttctgagtgcttcaggacactcagctcggctgggtgcaatggccctcacctgtagtcccagcactttgggaggctgaggcgggaggattacctgaggtcaggagttcgagaccagcctgaccaacatggtgaaaccccgtctctactaaaaagacaaagattagcaaggtgtggtggtacgcacctgtagttccagctactcaggaggctgaggcaggagaatcacttgaactggggaggcggaggttgcagtgagccaagatggcaccactgcactccagcctgggtgacagagcaagactctgtctcaaaaaaaaaaaaaaaaagaaagaaaaaagaaaaaaaaatccacttagctacatcttgctctataggtgccagtccccacttgctcctgaacccctcttctccccactgccctcagctctggaagcatgcagactcccttagcaaccctgaactaaaattgccttaagttaatttctgggccaggcaaggtggctcacacctgtaatcccagcactttaggaggcccagtaggggggatcatgaggtcaggagttcgagactagcctggccaacatggtgaaacccatctctactaaaaatacaaaaattagctggctatggtggcatacacctgtaatcccagctactcaggaggctgagacatgagtatcatttgaacccaggaggcagaggttgcagtgagctgagatctcaccactgcactccagcctgggcaacacagcgagattctgtctcaaaaaaaaaaattaatttctgaagtggggaaggtgctctccagtgagggttctgtggattggggccatcctcagaaagcccactccctccccagctggtgacatcactggcagggtgcactgacctgtactgcaaggccagatgcaatgctgtggcctcagcctcccgctggcctagctgcatgctgaggccttcacagcggcccttgtatccctgtagcacagctgatagcagacgattaaagcatttgagcttctcaatgctcctgttcccgaaggtggggaagagggaaagtcagaggccttctaaggcagtcaggcctcaatttccaccctttccctccctcctgttgcagcttcagactcctggctttataactcagttggaggaggtgcctgtgcccttatgagctcagcatttgagtctcttacccccggagttgctccatctgggcttccatgatgtgcatctcaggactgaggggctggttgggaagagacccaaggatctgggtgctggaatggctgcggaggcgccgaagcagggggtgagccagggagaaggagtcctgccaagaagaagtgatataactgaccccaattgtcaccaagagcctgggattgtaggcattttgcaaccccaaagctgttggatcccatgacaaagatttgagtctcattcccctgaaggctaaggacatcaagaccatgggattgaacttctcgcactcacctgagtctcccagggttccctgtctgcctcagagctgctagaaccactgcctgagccacctgcttggttgtgggaaagatgtgggcagggctccagcctcaagagggaatcctgcagctcttgaacctgggaaagatgagggggacgtcaggcctaggggctcaaaccaaccaccagccctctctccccaaggcctgttcttggggaagtggcaagaaccctagctggaaggcaagaggcttggatacttagcctgccaaaaatctcactatctgaccttgggaatgtttctcagctgctgaggattttatttttcccagcagaaaaatgggccccactctggggaaaaatgaatccctggactgggctccaaagtttttctaccagcctaagatgagggcttccctctcaatatctcattcagccacatggcttttttatttttatttttgagatggagtcttgctctgttacctaggctggagtgcagtggcacagtctcagctcactgcaacctctgcctcccggattcaagtgattctcctgcttcagcctcccgagtagctgggattacaggcatctgccaccatgcctgacaaatatttgtattttcagtagagatggggtttcaccatgttgaccaggctggtcttgaactcctgacctcaagtgatcttcctgactcagcctcccaaagtgctgggattacaggcatgagacaatgcacccagcagccacatggctttaaatgccacctgtgtgctaaggatgctcaagtttctcccttctgccctgctgtctcctctgagccctggactcagacatatagctgctcccttgaggaccccacgtggatgtctcatggacacttgagcttatcaagggctaaagagatctggtcacccccagccaaacctgcctaccctgtagctcctccatctctcccttctagtccagcaggtcccaaagcctgaagttgtccttgacttctctctagccttcacgctcacacgtcagttccatctgccacatcacccagaatccgtccgcatctctccacttctacaacctccaccatcgtgcatgtctggaccaatgaagtcgcctcctggctctccaggagtccaccctcacctccgccaccagagggcgcctgtgaacacctgcgtcgagcatgcccctcctctgctcaaaaccctccagggctctcaccttaatccaagcaaagcccaagcgtctccttgcagcccacgaggccctacgcgatctgcatttgttctccctctgttctgttctggctccccacactctccctgttgccccctgtgttccagccacactggcctccttcgggtttcttgaacaggccagtcatgctgccactccagggcctactcccaccaccctcagttttctttctttttctttctttctttctttcttttttttttttttttgagaaagagttttcttctgtcgcccaggctggagtgcaatggcgggatctcggctcactgcaagctccgcctcccgggttcacgccattctcctgcctcagcctccggagtagctgggactacaggcacccgccaccacgccggctaattttttgtatttttagtagagacgggttttcaccgtgttagccaggatggtctcgatctcctgacctcgtgatctgtgcctcggcctcccaaagtgctgggattacaggcgtgagccaccgtgcccagcattattattatttttttttttttttgagacagagtctcactccgtcacccaggctggagtgcagtggtgaaatctcggctcactgcaacctccacctcctgggatcaggcgattctcgtgccttagcctccctggtagctgcagaattgtgtcaagcaattctcctgcctcagcctccagagtagctgggattgcaggcacgtgccaccacacctggctaatttttgtatttttagtaaagacaaggtttcaccatgttggccaggctggtctctaactcctggcctcaagggagccacccacctcggcctcccaaagtgctggtgtagattacaggcatgagccactgcacccagccaacctggctgatttttttttttttttttttgagacagagtctcactctgtcccccaggttggagtgcattggcacgatctcagctgactgccatctccatcacccgggttcaagtgattctcctgcttcagcctcctgagtagctgggattacaggcctatgccaccgcacccggctaatttttttttgtatttttagtagagatggggtttgaccatgttggccaagctggccttgaactcctgactttgtgatccacccacctcagcctcccaaagtgctgggattacaggtgtgagccactgtgcctggccaacctggctgatttttaatttttttgcagaggtggcagtcttgctgtgttgctgaggctggtcttgaactcctggcctcaaaggatcctcctgcctccacctcccaaagtgctgggattataggtgtcagccaccacacccagccttaaaaggttttttgaatgaacaaatgaatgaatattgcctacatcaggcccacctcctccctcagacagagagccacatgggactcaggatggccccactcacctctttctgcagcgtctccttctcagctcggatggcctccagggaggcctgcgtgcggaccagctcatcctctcggctactcagggccagccggagccaggcattcctctcggccaggcgagctgcctctcgctggcagctccctgccccttcctgcttcccaagggaacctgctcccccttcgcttgtgccttcgaactccatcggcccagaatggctggggggctggtggcgccaggctgcagccgctgcctccagggagctcagagtgtgctggagggtctgaaacacatcgggggccccattcccagggggcacagtctccttgtactgtagggctgcttctggggcttggtgggcttccactgcaggtttgtggggcacttcgggggctgaggccagttccctgccagagcccccatccatcttcttgtcagtcctgtggacaccaactcaggcacttgagtcactccatgctgggcaaggaattcttttttattttttgagacggagtctcactctgttgcccagcctggagtgcagtggcgcgatctcggctcactgcaacctccacctcctgggttcaagtgattctcctgcctcggtcccccaagtagctgggattacaggctcccaccaccacgcctggctaatttttgtatttttagtagagacagggtttcaccatgttggctaggctggtgtcaaactcctgacctcaggtgatccgcccaactcggcctcccaaagtgctgggattataggcatgagccaccatgctcggccctgggcagggaattctgagggcttaaacttcatggtcttggggaggtgtgagcggagcagggagttggcaagagctgcgtgttctgggactggcatcccagggtgagactgggaggctgtgaattcaaggaagaggctagatagaggtggtgaagaagttggaggggagacctggagctgagaaacagagtgaagttggactgtgacgggcactgggaaaggcctgaaggtgagagacagaagtttctggaaatagggtcttctggggcggcggcttacacttgtaatcccagcacttttggaggccaaagttgggggatcacttaagggcaggagttcaagaccagcctggctaatgtggcctgtctcactaaaaatgcaaaacttagccggatgtggtggcgcacacctgtaatcccaactactcaggaagctgaggctcccgcttgaaccgggaggcaggggttgctgtgagccgagattgtgccactgcactgcactacagcctgggtgacacagcaagactcaaaaaaaaaagaaagtcaggctgaaggcaatagggagctatggtaggtgtgtgagcagagcaggcacatcagcagatctgtggatggcaaagatgcgtctggactggagtgaagggcacagaccaagcgggtcttacctgcttcctaggccttggccactgacctcctccatggggcccagctgctccagcccggagctcaccggaggtggggcaaagctgggcttggagctcccactggctgcctcgacctcctctgaactctcagccacgggatccagttcaccctgcaaatgacccccggggccctgctctgagccaggcaggacaggaccttggggtccccaggatctgggtgtggaggggagagggtgacacttacgggtggagcatgcctccctcgccggcttcggggccgcgtggcccgggcactcattgctgtccagaagccagtgccctctgaatgcttctccttcgtcaacccctaaaaccacagcctgccatgagctcttgcctttgttgtcctggacaaaggacaacctcaatttcctctgctgtgaaatggggcactgactacccctcaggaagggattttgttatcaatgttgattgggcagatttgaatgcctccctggacagggagctcactacctaagaaggttgtcctgatctcccccttcttctctgccttctttaccttcactacgtctttgtccactttcctcctctatttgagcctgggaatgcgatctcaagaattccctctcctccccggccctcctaaatgagaggttcagctctctctacctctctgatcctctgggggtaacttgatcagaggcctgagtcccgggacactctgttggggtcactctgaccactgcctgttcaggcctgggctggccaagcctggcctgggaggggctgggaaacaggaaaccccctcccctggtcacgtgacttgttattgtgttgtttccttctcggggacagcggcttcctgcagccctagcggggcacacatacctgactcccaaggtttcagcccctcctcttctcagcctccaaactcatggcccttctagctctgactcttggattttatttctcaagagctagaatgggccgagcaccatggctcacacctgtaatcccagcactctgggaagctgaggaagacagatcgcttgagtccaagagtttaagacaagcctgggcaacatggcgagacccccgtctttacaaaaaatataaaaattagccaggagtagtggcgtacgcttgtagtcccagctactcaggaggctgaggtgggaggattgcttaacacctggaagttgaggctgcagtgagccgtggtcacgtcactgcactccattctgggtaataaggcaagaccctgtctcaaaaagaaagaaaaaaaaagagctagaatgttcccgtgagctgatggtttttatttggctcccctgtgaacttttcttctctgcctgtctcttcattgtgggctgacagttctcttttttttgagatggagtcttgctctgtcgcctaggctagagtgcagtggcgcaaccttggctcattgcaacctccacctcctgggttcaagaaattctcctgcctcagcctcccgagtagctgggattacaagtgcccaccacaatgcccagctaatttttgtatttttagtagagacagggtttcaccatgctgaccaggctggtctcgaactcctgacctcaagtgatctgccagcctcggcctcccaaagtgctgggattacaggcgtgagccaccgcacccggctagggatgggtttttcccatgttggcgaggctggtcttaaactcctgacctcaggtgatccactcacctcagcctcccaaagtgttgggattacaggcatgagccaccgaccccaccagccccagaaacatttaagagccacttgaagcctcagtttatttatttattttattttattagatggaatcttgttctgccacgcaggctggagtgcagtggtgcgatctcggctcactgcaacctccacctcctgggttcaagcaattcttctgcctcagccttctgagtagctgtgattataggtgcgcgccaccacacccagctaattttttgtatttttagtagagacggggtttcaccatattggccaggctgatctctaactcctgacctcgtgatccacccacctcagcctcccaaaatgctgggattataggtgtgagccactgcccccaactcctcagttgtttttttttttttgagggtcaaagaagccggccacattggccaggctctaattcgagaatagccggaggggctgtgtaaggtgagctttgaagcataaagaacttgccagaaaagcaacaggaggaacagcattccaggcagaaggaacttcctgggcaaaggcttagagccttcaaagagccgctctaggtgacacagcgagactccatctcaaaaaaacaaaaacaaaaacgaaaaaaaaaaacacaacaaaaacccagctctactaaaaatactatatatatctcagccgggcctggtggtgcatgcctgtaatcccagctacttgggaggctgaggcaggagaattgctcgatccctggaggtggaggttgcagtgagccgagattgagccactgcactccagcctgggcgacagagcaagactcttgtctcaaaaaaataaaaataaataaataaatacttctggggctaagggggaagtgtgcactaagaagacaacggcagcctgggcgacagagtgagactccatctaaaaaataaaaataaaaaaaaaaggaaggaagcctagggtagtctgatgcggtggtcctcgcctgtagtcccagctacttgagcgatcgcttggctgtagtgactagccatgatcgcgtgactgcagtctagtttgggcgacagagcgataccctgtctctaaaaataagaaaaaaaaaagccatgaaaaaagaggtaggcttgaaataggcccgacttagcttcgctccacctacagtgacccaataagaccagagtaagtattttttgattcatgcaaatatatgtaaaataaggaacaagaattaagtaattgggaagggccctggatgctcaggccacacccacatgggaatacctgccccacatggaggctcaggccagctccaccaatcaccaatcagctcctcctctttccctaaatcggccttctccgtccctcttagcctatcacattgcaagctccacctctattccacgtttcagcctatcacggtagaagcactgactattgtagtctgattcggccaaaaacaaaaattcactaatttttttaatccaatcacatttcatactttgctccagtgtagccaatcacattccaggtcccgccgcacccagctccaggcagctctcactccaaaccccacccccaacccagtttcagcctatcagtttccaagttctttctagcctcaaccagtttctgtctctgcttgttctgcagcccgctgaactacatttcccaggaggcgtcggggctgcgccgtacaacttccggctgtaaagatggcggcttcctagtgagtcggcggctgatttagaaggaggttcaggctacggtgagccgaaggtgggtggtgaaagcgtgtggggcccgttcctaggggcccagctccctttgccccaagagatccagctcctcgcctttcctggggcttccgcctttatttctggtttctcctgcagtgtagcctccatccttcttgctgccgctaaagccttgtttttcttagaggtgtggggactgcaaggcgctcaaagaccatcttgggaagcccgtgcctatttcccagatagacaaactgctccattcgcgtcctgtttctctccaaggggaaccacagtactaatattttgcttctccctcatgcagacacccgctagggacgagggtgtcctagaggttattattcccttattcaccaagacattttcagttttaggtaacagaaaaccctactcaatctggcttaaggaagaaaaggaagttggtggcttatagattgggtctaacaggagctgggtccaggtggtcagaattcgatctgcagttttctcggtggagaccatttcgctttttaccgaggcaaaaggggcccctcacagctctcaactttattctaccagctctgcaactctaatgagagtctcttttccttgatgacactgctagaagttgcagagctgccactcaatggcctgatttgggtcatgtgcccatccctgagccattttcagtggccagagagctgggatgtgctcactggccgagtaggggcatggggctagcactacgttaaaaaaaaaaagaggaaaaaagaggggggactgttatcttatgtcggagtggctgctcggctgagaggtgtaaaaggcagccattctgcagctgaggaaagtgactccctaagaggagtgactcatcatcagtaagcggctcatcgcccctcttccttcttagtaaccaatcttttttttttttttttttttgagacggagtttcgctctttttgcccaggatggagtgcagtggcgggatctcggctcaccgcagcctcccctcccgggttcaagcgattctcctgcctcagcctcccgagtagctgggattatccgcatgcgccaccacgcccggctaattttgtatttttagttgagacggggtttctccatgttggtcaggctggtctcgaacttccaacctcaggtgatccacctgcctcggcctcccaaagtgctgggattacaggcatgagccaccgtgcccgaccgtaaccaaatgtttttaaaactccaaggggaggattctggcttcccctgtccgtgttccatctagccacacaggagccatggaagtggcagagcccagcagccccactgaagaggaggaggaggaagaggagcactcggcagagcctcggccccgcactcgctccaatcctgaaggggctgaggaccgggcagtaggggcacaggccagcgtgggcagccgcagcgagggtgagggtgaggccgccagtgctgatgatgggagcctcaacacttcaggagccggccctaagtcctggcaggtgcccccgccagcccctgaggtccaaattcggacaccaagggtcaactgtccagagaaagtggtaagtagagggggtggcctggggctctgagatgctagggaacctagcatcttgtcttttgggattaacactgcaaacattccctttgtattcgttacctgtggctgccacaagtcaccgtggacttggtagctttcaacaagagaaatttattctctcacagttcttggggccagaagtcaggtgtcgccagggccatggcccctcaggaggctctaagggagggaattctttcttgcctcttcattttgtctgtctttttttttttttttttttgagatggagtttcgctcttgttgcccaggctggagtgcaatggcacgatcttggctcactgcaacctctgcctcccgggttcaagcaattctcctgcctcagcctcccgagcagctgggattacaagtgcccaccacaacgcccggctaatttttatatttttagtagagacagggtttcaccacattggccaggctggtctcgaactcttgaccttgggtgatccgcctgccttggcctcccaaagtgctgggattataggcatgagccactctgcctgaccctttcttgccttttctagcctctcgtggctcctggcattccttggattgtggctgcatcactctagtctttgcccaattttttttttttgtttttttgagatggagtcttgctctgtcacccaggctggagtgcagtggtgtgatctcagctcactgcaacctccgcctcctgggttcatgccattctcccgcctcagcctcctgagtagctacaggcgcccgccaccatgcccggctaattttttgtatttttagtagagatggggtttctttctttcttttttttttttttgagaaggagtctcactctgttgcccaggctggagtgcagtgcagtggcgctatctcggctcactgcaagctctgcctcccgggttcatgccattctcctgcttcagcctcccgagtagctgggactacaggcgcccgctactacgcctggctaattttttgtattttttagtagagacagggtttcaccgtgttagccaggatggtctcgatctcttgacctcgtgatccacctgcctcggcctcccaaagtgctgggattacaggcgtgagccaccgcacccagccactgagatgaggtttcaccgtgttagccaggatggtctccatctcctgaccttgtgttccacccacctcagcctcccaaagtgctgggattacaggtgttagccaccgcgcctggctgtctttgcctaattctgtccagtcctcatatcctcataaagcctttctcactgtgtctctgtgtcttctccgcttctgtctcctataaggacacttgtcatcaaaacaggatcttatctcaagacccttactttaattacatctgcagagaccctgattccaaataaggtcacattcttttttttttttttttttttgagacggagtcccgctctgtcaccaggctggtgtgcagtggcgtgatctcagctcactgcaacctccggctccctggttcaaatgattctcctgcctcagcctcccaagtagctgggattgcaggcactcaccgccacacccaacaaatttttttttttttgagacggagtctcgctctgtcgcccaggctggagtggagtggcacaacctcggctcactgcaagctccgcctcctgggttcactccattctcctgcctcagcctcccaagtagctgggactacaggcgcccgccaccacgcctggctaatttttttgtatttttttagtagagaccaggtttcaccctgttagccaggatggtctcgatctcctgacctcgtgatcctcccgtctcggcctcccaaagtgctgggattccaggcatgagccaccacgcctggcctctttttttttttttttgagacagagtttcactctgtcacccaggctggagtgcagtggctcaatcagggctcactgcaacctccacctcccgggttcaagcaattctcttggtttagcctcctgagtagctgggattacaggtaggtgccaccacacctggccaattttttgtatttttagcagagatggggtttcaccatgttggccaggctggtctcaaactcctgacctgaagtgatccacccaccttgccctccctaagtgctgggattacaggtgtgagccactgtgccaggccaaataaggtcacattctcaggttctgggtggacatgtcttttgggagccacagttcgatccactatatcctcatttctgtgtttctgtgtcacacattctctggctcatttatttacttatctacttggactcccagttcagtgcccattcttctaagccattgcttttcaaagtagatggcttggctgaggattagaggtcaccatactgccttttcagacaaggcagcttgaagagggccagtgagtggtgtgggggccaacgttaaggtcagaggacgctcaccaccctccaactaccttgcagattatctgcctggacctgtcagaggaaatgtcactgccaaagctggagtcgttcaacgggtaagagggacattttagggcttgaacatgcagccatggcagggagggtccagcccaaaagatacggggctctcactctgaaactcacaccagcttggtctggcttcaggcttggcagtatcagagattagcaagagccaggtgcagtggctcatgcctgtaatcccagtgactcgggaggctgagataggaggatcacttgaggctaggggttcgagactagtctgggcaacatggaccccatctctaaaaaaataaaatatatatatgtatgtgtatgtatgtatgtatttatttatttttgagacagggtgtcgctctcttgcctaggctggagtgcaatggcatgagctcagctcactgcaacccctgcctcctgggttcaagccattcttgtgcctcatcctcccgagtacctgagattataggcatgcaccaccatgcccgtttaatttttgtatttttagtagagacagagttttgccatgttggccaggctggtctcaaaactcctgatctgaagtcatctgcctgccttgacctcccaaagtgctgggattacaggcatgagcacccagcctctaaatgtatttttaaaaaattagcgagcatggtggcgtgctcctagagtcccagctacttgggagggcaagctgggaggatcacttgatcccaagagtttgaggctgcagtgagctatgattttgccaccacactccagcctgggcgacagagcgagaccctgtcccttttttttgttttttttttgagacggagtctcgctctgtcgcccaatctggagtgcagtggtgcgatctccgctcactgcaagctccgcctcccgggttcatgccattctcctgcctcagcctccgagtagctgggactacaggtgcctgccaccacgcctggctaatttttttgtatttttagtagagatggggtttcaccgtgttagccaggatggtctcaaatctcctgacctcatgatccgcctgcctcggcctcccaaagtgctgggattacaggtgtgagccaccgcgcccagccgaccctgtctctttaaaaaaaggaaaaaagaagccgggcttggtggctcatacctgtaatcccattactttgggaggccaaggtgggcggatcacgaggtctggagttcgagaccagcctggccgacatagtgaaacccccacctccactaaaaatacaaaaattagctgggcacggtggtgcgtgcctgtaatcccagctactcgggaggctgaggcaggagaatcgtttgaatctgggagatggaggttgcggtgagccaagatcgcgccattgcactccagcctgggcaacaagaacgaaactccatctcaaaaaaagtaaaataaaataaaaaaagagtagcaaggacaactggtaatgttaaggctatggcccattgaggctccattcatagcaatgagttggagacgccaagaagcaaagtgacttgctcaagggctcagagtaatggggcagagccaggattcggacccaggcctggctggccctgaagcccttgtctggagtcatgtgctgcctgcagctgtatctggagtggggggcagtttgggttgcaggacctggatggggcttgaggacctccttggagatgttgaaggtgacaccttcttcccctcagtggcattcacaactgcccatggctgagcaaagttcctgcaatgactctaggggaaacttgagccccatgctgcgcagagggacccatttggagagggcaggagctccgatgtcagccagactgggtttgtggctgagctccgccacacccctgcagtatgacctatacctccagggccttatcatgcagggttttcagaggagggtggctgaaggaagtttttttttgtttgttttgtttttttttttttttttgagacagagtctcactctgtcgcccaggctggactgcagtggcgcgatctcagctcactgcaacctccgccttctgggttcaagcaattctctgactcagcctcctgagtagctgggattacaggcactcgccaccacgcctggctaatttttttgtatttttagtagagatggggtttcaccatcttgaccaggctggtgttgaactcctgacctcgtgatccacctgcctcagcctcccaaagtactggaattacaggcgtgagccactgtgcccggccctgagggaaccttaattcccctgtactctctgcctccccagctccaaaaccaacgccctcaatgtctcccagaagatgattgagatgttcgtgcggacaaaacacaagatcgacaaaagccacgagtttgcactggtggtggtgaacgatgacacggcctgggtgaggctgcggcaggcgctgggtgccctggggtcccctggggcccggggagcatcgcactgaggcctctgcttccctgcagctgtctggcctgacctccgacccccgcgagctctgtagctgcctctatgatctggagacggcctcctgttccaccttcagtatccttcctggcagagatgtccccatgaagggggctgtctccttctgtcatccttggggcccaggaaagtctaagtcatgactctggctggctgaggttcagatctcagatctgccaaggctgggaaagtcacccctctgagcctcagtttccccatctgtactgtggaaggcacaaagttgcctaccccatggagatgctgtaacaatacagaagcaaaagtacctgatttggtccgggcatggtggtccatgcctataatcccagcgacttgcgaggctgaggcacaagaatcacttgagtccgggaggcggaggttgcagtgagctgagatcttgccactgtactccagcctgggagacagagtgagactccgtcttttttaaaaaaaaaaaagaaagaaatacctgatttgtattcaggaggtccaaaattcatgcacaaggggatcacctcacacaggactgggcatacagtcagtgctcaataaatggcagtgtgtgacagaagtgtcaccattgttcctacagccacttgaacctgggcgcaggacattttatggtaatttggacataaaaggctcatgtgtggcccaaaactgaaatagaataggactctcgtaagttaaaaaaggaataaatggtgagagttttttccaggaggacaagacacccctggctcttttcattttgaggagagtggccccagccatgcaggaaaggggacctttttttatttttgctcctgttgctcttgttgccctggctgagtgcagtgatgcgatcttggctcattgcaacttccacctcccagcttcaagcgattctcctgccttagcctcccaagtagctgggattacaggtgtgcaccaccacacctggctaattttgaatgttttgtagagatggggtcttgctatgttgcccaggctggtcttgaattcctgggctcaagtgatcagcccaccccagcctcccaaagtgctgagattacaggcatgagccaccatacccggccccattctgttttaaaacataaattagattccatcccatcccatctctgctccaaaacctcccatggctccctgtggatcttatttattattatatttttttttgagatggagtctcgctcttgttgcccaggctggagtgcagtggcacgatcttggctcaccgcaatctccacctcccgagttcaagcaattttcctgtcttagcctcccaagtagctgggattacagacatgtgccatcaggcccagctaattttgtatttttagtagagacagggtttcaccgtgttggccaggctggcctcgaactcctgacctcagatggtccacccgccttggcctcccaaagtgctatgattgcaggcgtgtgccaccatgcctggcataccaagagtcttaaagtcatccggtaccagcatcctattttgtgatccatgctgaggggaatttgtgtgtcagagagggcaagtgacttggccagggtcacatggtgcgtccctaggggtgccgggtctcctctggtatcgggatcggggaagccacctgtttcccgctcactcgtgctctactagccttctccttagcacccccaccagatctggaaggacttttcagcctcatgtaagtcccctgtggggaaattcttattcaccttcaaagagaagggtcacttctgggaaaaagctccaaacggcacagaagtaatctagggagccttaaagcctcctcccttcctacctcgccccgagcaattcctcatttatgtgtgtcttgggagcatgggggctggtggagatgcacatgctgctaggcagctccagctgacggcagtgatgggggatgttcaggacactgagggtggccgggcccagtggctcaggcctgtaatctcagcactttgggaggccgaggcgggcagatcacctgaggtcaggagtttgagaccagcctgcccaacatggtgaaaccgcgtctctactaaaaatacaaaaattagctggccacctgtaatcccagctacttgagaggccgaggcaggagaatcgcttgaacctgggaggtagaggttgcagtgagccgagatctcaccattgcacttagaggggtggggctgggaacatgctcagggcagagggaaccgcttatgggatgcctcacaggcagcagtgaacttgggagacatcagtggggcctcacctgcccggtgagcatctggggtctctctcagggtgataagaggggcagacccccacaggctgctctgactgctccctcctcccgggtatgcagccagcagaaaactgagcttccggtcacagagaacgtgcagacgattcccccgccatatgtggtccgcaccatccttgtctacagccgtccaccttgccagccccagttctccttgacggagcccatgaaggtgggtgaggcctgggagagggaggggtgcctgcagccatgaggatggtggttagacaccaggagggacttccaaccacagaggctggggtgcctagaggtaagttcccagagtctgaggcagaaatgggggagctatagtcatggggcacggggtgacccaagccccagaggctggtgttctttacttcccctgcagaaaatgttccagtgcccatatttcttctttgacgttgtttacatccacaatggcactgaggagaaggaggaggagatgagttggaaggtgagaggctgcagcaggtgtgagtagcaggcgggtgtggacaggatgtcttggaacacacctgcactgggtctgggggtctctacctccatttgatacccctggaaccctggttggggtaggtcatggcattggtcattgaacagccgtttcccagttgtctgctgtgactgatggggtggcagccattgggacgatggtccaggcaacatgttgagtcctgcctcccccatctccaacgttccctgcgttcctttctttcttgcttgcttgcttgcttttctttcttcttctttttttttttttttttgagacagagtctccctctgtctcccaggctggagtgtagtggcatgatctcggctcactgcaacctctgcctcccgggttcaagcaattctcctgtgtcagcctcccgagtagctggggttacaggtacctgccatcataccaggttaatttttgtatttttagtagagacggggtttcaccatgttggccagactggtcttgaactcctgatctcaggtgatctgcctgcttcagcctcccaaagcgctgggattacaggtgtgagccaccacgacccgctccctcttccctttcttcctgcctttgacctcgctgcaccctcagcctggagcatccatccctcttggactccccaggccctgctgggccttcacatcccagacctgaattagctgtgggacctcgagtggactacttacttctctgagcctcagtttacccaactatgaacagggaattgagaccagctcctccttatatctcagtacccaaatcaaaagtcccccctctagccaggcgtggtggtgtacgcctgtggtcccagctgctcgggaggctgagacaggaggctcgctagagctcgaaaggtggagattgtagtgagctgtgatgaagccactgcactccagcctgggtgacagggcggagaccctgtgtcaaaaaataaaaatacggccaggtgtggtggctcacacctgtaatcccagcactttgggaagccgaggcgggtgactcacttgagttgggagttcggaccagcctgaccaacatggagaaaccctgtctctactaaaaatacaaaattaaccaggcgtggtggcacatacctataatcccatctactcaggaggctgaggcaggagaatcgcttgaacccgggaggcagaggttgcggtgagccgagatcgtgccgttgcactccagcctgggaacaacagcgaaaccctgtctcaaaaaaaaaattaaaaaaataaaataagtaaaataaaaagtccctcctcttgagaagccctccctgtttttcaagaaggatcaaagtgggggccaggagaatgtgtctgtatctgactgtgtgcctccacactggggactcttttttttttttgaggcggagtctcgctctgtcgcccaggctggagagcagtggtgtgatctcggctcactgccagctccgcctcccgggtttgcgccattctcctgcctcagcctcccgagtagctaggactacaggtgcctgccaccacgcccggctaattttttgtattttttagtagagacggggtttcactgtgttagccaggatggtcttgatctcctgaccttgtgatctgcccgcctcagcctcccaaagtgctgggattacaggcgtgagccaccgcgcccggcccacactggggactctttgggggccatgactgggacctcttcagatccttaacactgggtccatggcggggaatgtttgctgaatgtgtgaatggtttctgcttggcaaactcctcttcaccctttagaacccaccccagatgtcccctcttctgagaagccctccagggatatgaagggcctgttggggtaacctctgcctgaacagcccttcactgacccccgcctccccggcaggatatgtttgccttcatgggcagcctggataccaagggtaccagctacaagtatgaggtggcactggctgggccagccctggagttgcacaactgcatggcgaaactgttggcccaccccctgcagcggccttgccagagccatgcttcctacagcctgctggaggaggaggatgaagccattgaggttgaggccactgtctgaaccatccctgtacatctgcaccttcttgtgcaaggaagtccttggcctaaagccttggttctcaaactgggttccttgggacctccggggtgggggggttccaggaggcacgtagggtaccttgcagggtcctaggagggaaacccaggattccaggagggatcccaggaactgtgggcacccattttctgtgtctcccagcccatttccactcctagtttgtcatggataatttttgttcttccctgtgtgatttttgccatcaaaataaaaatttgagactcgttaaccgaagtccacgccaatcactttgtgttaatggggatcatcttcattgcaagtgatggaaaacttagccactgagcaaaggtgagtggctgctttcttgtagatgaaaaagccccgggatgtggaggttgcagcgagttgagattgcaccactgtactccagcctggtgatagagtgagagcttttctcaaataaaaaagaaaaattcaaaaataaaaaagatgaaaaagccaagagaacagcttcaggcttggctgtgtccaggtgctaggacaacattgccatttgggagggtactacatggttgctagtcaatgtgccctgcttaccccccaaccaatggaaaggtgtgtgatggcttcaaccactccccagaccccaatccaggtcaaggcagagttctctcagcatctggatatgattggactcccccggggggatacatgaccttcaattaagagctagtcatgtaccagggttgtgtgatgttctgatgagccaggcctggatcatacatccctaagggggaggtttaagagctccatcagcagtactgaggccatgataggagggttgcttgaggccaggagttcaagaccacgctggacaacatagcaacatttcctgtctctacaggaaatgcaaaaattaagccaggctcggtggctcacgcctgtgattcccagctacttgagaggctgaagtgggaggatcacttgaacctaggaggtcgaggctgcagtgagctgtcatcgcgccactgcactctagcctgggtgacagagcaagaccctatctcaaaaataaacacaaacagctttattgagtgactgcttttcctccctatgagcattttttggaacctatcgtgtgtcaggcccttgtgcccaagcccctgttcaatccccgcatcaacctcgttaggattctcacattttgcagatgggacactaagactctcagaggtccagccctccaaaatactgaagtcctagttccgctggattgaaaatgggcaacgcagaacggggactggaaattttttaaaaattgtttttaaagacggggtcttggccaggcgcagtggctcacggctgtaatctcagcactttgggaggccgaggtgggcggatcacaaggtcaggagttcgagaccagcctgaccaacatggtgaaaccccgtctttactaaaaataaaaaattaggcgtgatggtgcatgcctgtaatcccagctactggggaggctgaggcaggagaagctgttgaaccctggaggaggaggttgcagtgagctgagatcacaccactgcactccagcctgggcaacaagagcaaaactccgtctcaaaaataaataaataaataaaacaaagacaaggtctccgcctgtaatcctagcactttgggaggccgaggcgggcggatcacctgagatcaggagctcaagaccagcctggacaacatggtgaaaccccatctctactaaaaatacaaaaattagccgagagtggtggcacatgcctgtaatcccagctacttgggaggccgaggcagaatagcttgaacctgggaggcaaatgttgcagtgagcccagattgcgccactgcactccagcctgggcgacagggtaagatccggctcaaaaaaaaaaaaaaaaaaaaaaaaaaaaatagggcctcactccgttgcccaggctggtctcaaactcctgcactcactaaaagaaaagaaaagcaacaacaaactagtaggctcaaacgatcttctctcctcagcctcccaaagcactgtgcttaaaggcgtgagctgggccctcggcctgggggttggaaattgaagcctctattttatgtatttatttattttctgagacagagttttgctctgttgcccaggctggagtgcagtggtgtgatcatggctcactgcatcctcgaacttccgggctcaagagattctaccaactcagcctcccaagtagctgggaccacaggtgcaagccacccacgcccggctagttttttgtatttttttgtagggactgggtttatccaagttgcccaggctggtctcgaaccccagagctcaagcaaccctcctgcctgggcctcccgaagtgctgggattacaggtgtgagccaccgtgcccggcctaagcctctcataaggccgtgctccctgccagaggccacccttgaagaagattccctgagacttaatgacctggggcaccccggactttcttaatcgtagctccacccactcgagccgggtgccttcgcgtttcccgtttttaaatgagatagtggcacacccggtggcatcctcccacccgggctcttatcggcggtcccagaccctgcttgagcgcctccgggtgtcaagggcccctgaggacactaaagctctcgaaccccgatgtggacccccgtgcggcgcggggcagcctggctgggaaccctgctcggccctggagaggggccccccgagccgaggggaggagcggcgcatgcccacaagccccccgcgggaagtaggaaatcgaccgaccaggcggtgcgcttcggacccagccagggcatgtgctcggaggcccgcctggctcgcaggttgcgggatgcgctgcgggaggaggagccgtggtgagggcggggccgggggcgggccaggagtgggggtctttggccggggtccactctgaccgcggtgtttgcagggcagtagaggagctgctgcgctgcggcgcggaccctaatttggtgctagaggacggcgcagcggctgtgcacttggcggccggagcccggcacccgcgcggcctgcgttgcctcggggccctactgcgccaaggcggggaccccaacgctcggtaagatagagcctgggtccggggcggggtctccccaagccgaagtctgggaatccgggaaggggcgccccatcatcccgggccaggcctcggggctcgagggtggggtttaggggatcttggggagggaacttgggggtccaagggcaggggctagggctcgagggaggcgctggggtcccagaccgagggcgtggaatggggctgcgctaggaccaaagtggggatcaagggttcggatattggagtggaggcaccagggtcagacggcagaggtttgggtcctggcctgaggtcatagcatctaggttccaagggcagtgtaccagggtggacggcggagatccgggaggccgagaacgaaggctccaggtccccagagcggagatcggggttcctgccgggaggctgagtccgcaatgacccctcttgcgctgccgccccagatctgtcgaggcactgacgccgctgcatgtggccgccgcgtggggctgccgccgcggcctggagctgctgctgagccaaggagcggacccggcgctgcgcgaccaggttgggaggcactgcgcgggcaaagaaaggctgggtgagcccagagggagggaaggaaggtaagagggcctcgggcgccccctgctgaccgcgcccctgtaggacggactccggccgctggacctggccctgcagcagggacacctggagtgcgcgcgagtcctgcaggatctcgacacgcggaccaggacccggacccggatcggggcagagactcaggagcccgagcctgcacctggcagtgagtagggcctgcagggctgctggggcttgacttctggaccagtccctgacatccagggtcttccccaccccacccattggttctgaccgtctcacatccactatttgtggccagctctttcggcctcagacactctgatctcctttttctgtttgatcctattctcatcgctgtctcatccctcctcctctcctctctggcccccactctcacctgcagccccaggcctctctggacctaccgatgagacgctggactccatagcactccaaaagcagccatgcagaggtgacaacagggacattggcttggaggctgacccaggaccccccagcctccctgttccccttgaaactgtggacaaacatgggagctcggcgtcccctccagggcactgggattacagctcagacgcctctttcgtcacagcggttgaggtctctggagctgaggacccagcctcggacactcccccctgggctgggtcattgccaccgaccaggcagggacttctgcatgttgtccatgccaaccagagggtacctaggtctcagggcacggaggcagaactgaatgcccgtctgcaggccctgactctgaccccaccaaatgctgctggcttccagtcctccccttcctccatgcctctcctggacaggagtccagctcatagccccccacggacaccaacccctggagcttctgactgccactgcctgtgggagcaccagacatccattgatagtgacatggccacgctctggctgacagaggatgaggcaagctctacaggtggcagggaacctgtcggcccttgccggcacctgccagtctccactgtgtctgacttggagttgctgaagggactccgagcacttggtgagaatcctcaccccatcacacccttcaccaggcagttgtaccaccagcagctggaagaagcccagattgctcctggttagtcttcccagggcacatggagtccagggagcctccaggaatctcccggagaaccccagctctcagccccactttcctccccatctcagaatcatcccttcctccatctcccttgacttccaggcccagagttttcagggcacagcctagaactggctgcagccctgcggacgggctgtattccagatgtccaggcagatgaagacgcgctggcccagcagtttgagcagccagatcctgccaggaggtggcgggagggggtcgtgaagtctagcttcacctatctgctgctggaccccaggtactcagggcaggaaagccccagaaatagaaactagaaaatttggggattggtttttatttgctgtgtgcccttaagaaagggactggccctagaatcatcagctgcttcttcttctttttttttatttttttaagacggagtttcactcttgttgccaaggcaggagtacaatggtgccgtctcggctcactgcaacctccacctcccaggttcaaacaatcctcttgtctcagcctctcaagtagctgggattacaagcacctgccaccacgcccgactaatttttgtatttttagtagagacgaggtttcaccatgttggccaggctggtctcgaactcctgacctcaggtaatccacccaccctggcctcccaaaatgctgggactacaggtgtgagccaccgcaccggcctctttttttttttttttttttgaggcggagtctcactgtttcgcccaggctggaatgtagtagcgcaatcttggctcactgcaacctccgcctcctgggttcaagtgattcttgtgcctcagcctcccaagtagttgggattacaggcatgtgccaccatgcctggctaattttttttgtaattttagtagatatggagtttcaccatgttggccaggctggtcttgagctcccagcctcaagtgatcctcctgccttggcctcccaaagtgttggcattacaggcatgagccccggctggccatggtggctcacgcctgtaataccagcactttgggaggctgaggtgggcggatcacctgaggtcagcagttagagaccagcgtgttcaacgtggagaaaccccatttctactaaaaatacaaaattagccaggtgtgttggtgcatgcctgtaatcccagctattcaggaggctgaggcaggagaatcacttgaacccaggaggtggagattgcagtgaactgagattgtgccattgcactccagcctggggaacaagagtgaaactctgtctcaaaaaaaaaaaaaaagaaagctgctgaatgtctttggggagccgctgactctctctgatcctgtaatcaggagtcactagacatgggttcaagatatgttgtgactttaaggactgcctctggggaccactgtatccacttttccctgtctgagctatccccttcatccagggagactcaggacctgccagcccgagccttctcactgaccccagctgagcgccttcagactttcatccgtgccatcttctacgtgggcaaagggacgagggcccggccatatgtccacctctgggaggcccttggtcaccatgggcggtcaagaaaacaggtgtgaggacagggatcagggttcagcgagggcagtcgggccatgggcaggggagggtattgggggtgctgactcctgattctgccctagccccaccaggcctgccccaaggtgcgtcagatcttggacatctgggccagtggttgcggtgttgtgtccctacattgcttccagcacgtggtcgctgtggaggcttatacacgggaggcgtgtattgtggaagccctaggtgggtgcctggtacctagaatgggggtcatatgaaaggcatttggcttcccagttccctcatttttttccttctgaggggtgttcatttgttgactgagcaattattgagcaccaactttgaacctgcacatgcatgtattttgctccattggtttatccccactcaagggcaatacacattgggtttgctgtcacatacttttttgtgtgtgtgtgagactctgtcgcccaggctggagtgtggtggcgtgatcccgactcactgcagcctctgcctcccaggttcaagtgattcttgtgcctcagcctccccagtagctgagattacaggcacatatcaccatactgtgccaagctaatttttgtattttttagtaaagacagggtttcaccatgttggccaggctggtctcgaactcctggcttcatgtgatctacccaaagtgttgggattacaggcgtgagccaccatacccagccgcctgctgtcacacacttctgctggatggggaggtgtccccatggctgcccctgtgaccccacatccaatttctccagggatccagacgctcaccaaccagaagcaagggcactgctatggagtggtggcaggctggccacctgctcgtcgccggcgcttgggggtgcacctgctgcaccgtgccctccttgtcttcctggctgaaggcgagcgacagcttcatccccaggacatccaggcccggggctgagtgctggggagttggccatccagcctggggagaaatgtttgaatgttccagctgccccatgctgacagcagcccccatctctggtttcagaaggggtgtgtgtgtgtgtgtgtgtgtgtgtgtgtgtgtgtgtgtgtgtttgtgtgtgtgtgtgtgtgtgtagggagcacccaggcagatctcccccaggctgagagaggactttgttacagatggtactgctggagaggtagtaagtagtgagctccccatcgtgggaggaggacaagaagggaagcagaaggtgctttggaacagtccggtgcttctgtaagaggcgtttgaacctgggcaactccacctggaataggagctgggtaaaatgaggctgaaacctactgggctgcattcccagatggttaaagcattctaagtcacgggatcaggtaggaggtcagcacaagataacgggtcataaagaacctgctgataaaacaggttgcagtaaagaagccggccaaaacccaccaataccaagatggcgacaagagtgacctctggtcgtcctcattgctacactcccaccagcgccatgacagtttacaaatgccatggctggccaggcgcggtggctcacgcctgtaatcctagcattttgggaggccaaggagggcagatcacctaaggtcaggagttcaagaccagcgtggccaacgtggcgaaaccctatctctactaaaaataccaaaattagctgggcatggtggcgcgtgcctgtaatcccagctactaggggggctgaggcaggaggatcgcttgaacccaggaggtggaggttgcagtgagctgagattgtaccattgcactccagcctgggcaacagagcgagagtctgtctcaaacaaacaaacaaaaaaacaaatgccacatcaacatcaggacgttaacctttagaccctatatggtctaaaaaggggaggcatgaataatccaccccttgtttagcatatcatcaagaaataaccataaaaatgggcaaccagcagccctgccctgtctatggagtagccattcttttattcctttagtttcttaataaatttgctttcactgtactctatgaactcgccctggattctttctagcgtgagattggagaaccctctcttggggtctggatcgggcctttctggtaacactttggcagcttggtgctgtcaaaatggatggagcctgccaggcgcggtggctcacgcctgtaatcccagcactttgggaggctgaggcaggtggatcacaaggtcaggagattgagaccgtcctggctaacatggtgaaaccccgtctctactaaaaatacaaaaaattagacaggcatggttgcaggcggctataatcccagctactcgggaagctgaggcaggagaatggcatgaacctgggaggtggagcttgcagtgagccgagattgtgccactgcactccagcctgggcaacagagcgagactctgtctcaaaaaataaataaaataaaatggatagaggctgcttttaccgcccagacatgggacacccacatggcgggttggactgggggatcctcagctgcactcaggatatctacccagctcaagagccaagttcactgctacccagccgtgagacctctgatcagtattttatctgcctgagcatcagtttccttggttgtacagtggaggcagtaaagaggtcctactccaggggatcattgtaaggtcatgttggggctgggtgtcacgcttgtaatcccagcactttgggaggctgaggcgggagcatagcatgagcccaggagtttgagaccagcctgggcaacatagcaagactctatctctacgaaaagtaaaaacattaggcggatctggtgggtgggcctgtggtcctagctgcttgggagcctgaggtgggaagattgcttgagcctgggagttggaggcttcaaggagctaccatcacagcactgcactccagcctgggcgatatcaagatcctgtctcttaaaaaaactataaaaatttaaaaataaggtcatgtgagcaaagtgtgtggctcagagcccaaagtgtgtggcagtgcagcccaggcgagaacttgctggaggaaggggaggtgtgggggccctcaaggggccgcctgtgtgatgaggcgtgagcagggctgggaccctcctcaggatcattgtgcaaccccagcctcccctgttgcttctgggaacctgtttatccactataaaatgggattattggccgggctcggtggctcacgcctgtaatcccagcactttgggaggccgaggcaggcagatcacctgagttcgggagttcgagaccagcctgaccaacatggagaaaccccatctctattaaaaatacaaaaattagctgggcgtggtggcgcatgcctgtaatctcagctacttgggaggctgaggcaggagaattgcttgaacccgggaggcggaggttgcagtgagccaagatcaagccattgcagtccagcctgggtaacaagagcaaaactccgtctcaaaaaaagggagggatcattaataataacccggcagggcgtggtggctcacgcctgtaatcccggcactttgggaggccgaggcgggtggatcacctgaggtcaggagttcaagaccagcctgaccaacatggtgaaaccctgtctctactacatacaaaacatgagccgggtgtggtggtgagcacctgtgattccagctacttgggaggctgaggcaggagaatcacttgaacccgggaggcgaaggttgcagaaaactgagatcgcgccactgtaccccagcctgggcgacagtgagactccgtctcaaataataataataataataataataataataataataataataataataataaataacccgacttccagcgatgctatgcgacttcagaccattcatgtgcaaaggtcttaagtaaataccaagccgccatcctggtgagatgtcagcggtctggtttcgggcgggcgggggtcgggggggggtcgagggcatttaagcttctggaagtcgcttctgcaaagggcccggtgcatttagggacttgggagagatccgctgcctcattggtttcaggacctgccggtcatcacggcggtttagccaaccaggtcccccagggggcgggctgtgacctgggccgagtttccacccacctcgccactgcttagccaccggctgctcctcggggaatggctggtattgtgattaggggtccagtctctggagtgggtttgggctcgaccacttgtaatcgagctgaagaaaccgctctctgagcttcactttcctccagtgtaaaacaggggccaggcaccgtggctcacgcctgtactcccagaactttgggaggccgaagcgagtggatcacctgaggtcaggagttcaagatcagcctggccaacacagtgaaacactgtctctactaaaaatacaaaaattagccgggcgcggtggcgggtgtctgtaatctcagctactcgggaggctgaggcaggagaatcgcttgaacccaggaggctgaggctgcagtgaaccgagattgtgccactgcactccagcctgggtaacagagcaagacactgtctcagaaaaaaaaaaaaaagtgtgaaacagggatgcctcccagttgccaaatctaataataaagccacaggtgttatgacactgtgccatcgccccagaatacacaaacaggacattggtaaagaacctagagcccccagaagagatgggatttgtctaacacagggtttcccaatcttggccctaatgacatttggggttggcttattctttgctgtggggtctgtcccttgcatttcagggtgatgagcagcgttcctggcctccatccactagaagtcagcaacacccatgcacccccaaacatggcgatcaaaaatgtctccagaagttgccaatggacacaattgcccccctggctaaactaaggatggagctcacaaaccggtggggaaaggacagaaccgagggaaagatttcctccctcctcctgtaatacacagaaaccacagataggaccagatatacatggaccagaataaaatgtaggtgaggtgcggtggatcacgcctgtaaccccagcactttgggaggccgaggcgggtggatcacgaggtcaggagttccaagaccagtctggccaagatggtgaaaccccgtctctactaaaaatacaaaaattagctgggcgtagtggcaggagcctgtaatcccagctactccagtggctgaggcaggaaaatttcctgaacccggggggcggaggttgcagtgagccgagatcgtgccactgcactccagcctgggcgacagagtgagactctgtctcaaaaaacaaacaaacaaacaaacaaaaacaaaaccaaaacccaactaaaagacagatttggtggtttcaaaagaaaagtcttcttgacaaaggtggccctaaaccaagctgaaagatataacacgggaatagtaaaaggtcctgacttgctgggtggggttggatgagtcgaattcaatgaaccagtgggtggcaggcattcaacacacagcctggaaaacagtgggcactcaattatggcagctctaattccatgcaacacccactgatcttcacctaaacctcggttggatctcttccggccagggaagggctcatctcgtttttttttgagaaggagtatcgccttgttgcgcaggctggagtgcagtggtacgatctcagctgaccgcaacctccacttcctgggttcaagcgattctcctgcctcaggctccccgagtagctgggaccacaggcgcgtgccaccattcctggcttgtctttgttttttgttgttgttgttgttgttgtttgtttgtttgttttagatggagtctcgctctgtcacccaggctggagtgcagtggcacgatctcggctcactgtaatttccgcctcccgggttcacgccattcttctgccacagcctcccgagtagctgggactacaggcgcccgccaccacgcccagctaattttttgtattttttactagagacggggtttcactgtgttagccaggatggtctcgatctcctgacctcgtgatccccccacctctgcctcccaaagtgctgggattacaggcgtgaaccaccgcgcctggcctgtctgcatttttaaatagagacggggtttcaccattttggccaggctgttctcgaactcctgacctcaggcgatactcctcggcctcccaaagtgctgggattacaggcgtgagtcaccacgtccggccggggtcacctcttgataagttgcctcctgccctgggggatactgtccaaggagcctcagccttctgaggtacgaggggaaattcaggaagctaacgtggacaccagacattgtcgaagtcgatcctgagcgcgaggcaccagcctgagcccagtctgcagatgggaaaactgaggctccaggcggcgaacaccctgccctgtggtcacccagcacaggtccggagactccgattgtcacttctgtttattgagttacaagttgagatgtgcaggttcggtggcgccagcccccccatcccccccccttgggcaaaaatagctcccagcgccgaggaatggggggtaggaagggtctcggataacgggatggggcctcgagggtccctgtggggctcgtgggtcccaggatcaagcacggctgacacggaagacagcggggtggggggcctgccttggccgtggcgttggggggaaggtgagggagagcttctgtacaaggtcatcttccgtgagggtcccggctgcggccccaaaacgccgatgggccccgcgggacggaagcggagagcggaatgtccgctgggctccctcggatgccacgccccgcccaggcagcctgggggcgtctccctgacctggccccgcccaccggagcgaacggcccgcccaggtggtctgcgctgcagacctggcgcaggctcgggcctcctcctgctgcggctgtgctcaccaagcgatgccccgccggcccagcggctacttcttgtcttctggaggcgccggcagtggctccggtagagccttgggcgagggctcgggctcccagagcaggaattcgtggagcagcgtgttgaccgtctcagggcattccagcatcaccatgtggctgccctcgtcgatgagcttcaggaatgccaggagcaggatctgcagaagacgcagggctcaaggtaggcgggggcaagagggtggagagaggccaggcttccctgggactccgccatacacacatggcccacagcatccaaaagtccctcctcccatctaccctgcatctctccacttccactcaagggggagctggaggatggcctgtagccctgctggaacccaactagtattcaggcatccagcatttattaagtgtctacagtatgccaggagaaggattttcttctttttttcttttctttctttttttttttttttgagacagagtcttgctctgtcacccaggctggagtgcagtggcgtaatctcggctcactccaacctctgcctcccggcttcaagcgattctcttgcctcagcctcccaagtagctgggattacaggcacgcgccactacacccggctaattttttgtatttttagtagagacggggtttcgccatgtttgtcaggctgatctccaactcctgacctcaggcgatctgcccgcctcggtctcccaaagtgctgggattacaggagtgagccaccgcgcccggcctggaggaggattttgtcaacttcaactctaccaacattaggagctggatcattctttgctgggggggcgggggtgggcggggaaggggcgggtagctggggtgggggctgctatcctgtgcatttgtagggtgttgagcagcatccctggcctccacccactagatgccagtagtaccccctccccctcagtcgtgacacctaaaaatgtctccatgcatttccacgtgttccttgggggcagaatcctccttagttaagaaccaccagtccagttatactttaatggtttttgtttttttttttttttctttaagaaacggggtcttgctctgtcgcccaggctggagtgcagtggtgcgagcatggctcaccacagccttgaactcctgggttcaagcgatccgccccactcagcctcccaagttgcagcgattattggcgtgaaccacctcgccgggctagtatccagggctattctaagtgctaaggatccccagaccctttctaatctgaactcgctaattagagtttctaatctaaagatcccctggtgccggtcttctagaattatataggtcaccggtctcatacaaatcctccgctgtgaggagagccttcttacagcggtggggacagtgcgtaattgctaacacctgtccagggcagccctgctttctagattctacttctgatgctagacctaatgctcctgtttgcctggggtcagaacaagatacagcaactagaggccacgcccacccggcagccacgccccctcgggaagaaagcacgcccaccaagcgctaccacgccccccgcagaggccacgcccctcccgggcagcaccctggggatttgtagctgtggcgccccaggtgcccgcctctacctcggccatgcgctggtcttcctccaccggcacaaacttatcgtgcatgccgtggacaagcaggacgggcacggtgagctcggcgtggtagacctcgtcgccctcgggccagtactggccgctcatcatggcccggagtacgaaggatgacacgttgaaagcgttgccctcctttaacagctgcttctccttggctccttggcgggcgaagccggccctggtggtggtggaggcaccgctagagccccttatgccagcccgactgccgtggggtgcccccgatgccagccctagtcccagcggtacagtcccccctcccatccaactcgagcagatgcctgggttcgccagggccaggatcacggtctttggggtggggacactcacttgaggaagctccaggccaggcagggcgacaagcagtgcaggacgcaggtgggcatgttgaagattgagcagaagctgggctccagcgccgtagggcccccgccattgatcatgatcaccttgtgcactaggtctgggtactcatgtgccaggaatgtgcagaaagagacactgcccggaacgggtggggtgataggaggattgaagggaggcggtcagcaggatacaagcagtgaccattttgttttgctttgtttttgtttttgtttgagacagttttactctgtcccccaggctggaatgcagtggctccatcttggctcactgcaacctctgcctcccaggttcaagcgattctcctgcctcagtctcccgagtagctgagattgcaggcgcacaccaccacacccaggtaattttttttttttttttttttttttttgagacggagtctcgctctgtcgcccaggccggactgcggactgcagtggcgcaatctcggctcactgcaagctccgcttcccgggttcacgccattctcctgcctcagcctcccgagtagctgggactacaggcgcccgccaccgcgcccggctaattttttgtatttttagtagagatggggtttcaccatgttggtcgggctggtctcaaattcctgacctcaagtgatccatccgcctcggcctcccaaagtgctgggattacaggcctgagccactgcgcctggcctggtttgtttttgtttttgagatggagtctcattctgttgcccaggttggagtacagtgatgcaatctcagctcactgcaacctctgcctcctgggttcaactgattctccttcctcagcctcccgagtagctgggagtacaggcatgcaccaccacacctggctaatttttgtattttttagtagacacagggtttcagcatgttgctcaggctggtcgagaactcctgacctcaagtgatccacccaccttggcttcccaaagtgcggggattacaggcatgagccactgggctggcctgttttgtttttgtttttgagacaaggtttcgctgtcgcctaggctggagtggtgcggtggcgtaatcatagctccctgcagccttgacttcctgggctcaagagatcctcccacctcagccttctgaatagctgggactacaggcatgtgccaccatgctcagctaatttttaaaaatttttttataaagacagggtctccttatgttgcccaggctggtcttgaactcctgggctcaagtgatcctctggccttaacctcccaaagtgctgggattataggcgtgagccgtgacacccggcctggtgagggggttcatgtcctccccctacccagaaggcaggtccttggaagccaagattcttcccctggggtccatggacacctgaaggggtgagggatgagtgcggcctctcaaataccgtgaaagtgtgagtttgagtgttgaggatggaacttattttgaagagagaatctggatccagaagtttcaccagactttttattttaattgtttaaaatttttgtagagatgggggtctcactatgttgcccaggctggtcttgaacttctgggctcaagtgatccttccaccttggccttccaaagtgttaagattatagatatgagccactgtgcccggccctcatcagattcttcaagccaccatgacccaaaagcggtaagaattactcatcagcaagtggtaggaaagcaatctgattaaacaaatgcttccggctgcccaggggaggtcactgtttcctactatcccttccctttcaggatgttctgccacctgcctctgggcatgacatatctgtcttccttatacaagatggaaggcctgagaagcccccaaagctgagctcctcattcctacaaaagcaggggtcaacaaactatgtacggcctgtgggctagtcatttgcttttttaaatacagtttacacttttggagatttgaaaaatgtttcctaaataaggtttttttttttttttttgagatggagtcctgctctgttgcccacgctggagcacagtggcgcgatctcggctcactgcaacctccgcctcccgggttcaagtgattctcctgtctcagcctcccgagtagctgggattacaggcatctgccattatgcccggctaatttttgtatttttagtagagacggggtttcaccgtgttagtcaggctggtcttgaactcccgacctcaggtgatctgcccaccttggcctcccaaagtgctgggattagaggcgtgagccaccgtgcctggccaaaaaatgtttcctaaataaagttttatcagaagttccaacagtgactgtatggcctgcaaacctaaaatattcgctatccgatcctttaaggaaatgtttgccagcccctgctgtaatgaggaaaggatacagacaggagtcaggcagacctgattgtgtcagggacttcctgtatgcctttgggcaggttgcttcacctctctgagcttcagcctccacattcctgaagttgtaaatgtgctgacctaatagcactgttatggggtcatgggaactattgtaggtgggtgttttttttgtttttttgtttttttctcgagacagagtcttgctctgtcactcaggctggagtgcaatggtgcgatctcggctcactgcaacccccacctcatgggttcgaatgattatcctgcctcagcctcccaagtagctgggattataggcacctgcaaccatacccagctactttttgtatttttattagagacggggtttcaccattttggccaggctggtcttgaactcctgaccttgtgatccgcctgcctcggcctccaaaagttctgggattacaggtgtgaaccactgtgcccagcaggtgggtgctcatttaattagaggaatcatttctcataagcatcaacttttgagtatgttatataaagaaatataaacaaataagagctgttacctctcagtctagattcctttcttttagatacttatgtaacttctttgttttcttttcttttttttttttttttactttttagttttttgtagagatgagatcttgcttatgttgcccaggttggtcttgaactcctcagctatagcagtcctcccacctcagcttcccaaagtgttgggattataggtgtaagccaccacacctggccacttatttatttttcttttttctttttttttttttttgagatggagtctcactctgtcacccaggctggagtgcagtggcacaatctcggctcactgcaagctccacctcctgggtgcacgccattctcctgcctcagcctcctgagtagctgggactacaggcgcctgccaccatgcctggctaatttttttttgtattttttagtagagacggggtttcaccgtgttagccaggatggtcttgatctcctgacctcctgatccgcccgcctcggcctcccaaattgctgggattacaggtgtgagccaccacgcctggcctttttttcttgtctaattgcataggctagaatctctaaaacagtggtgctcaacttgcctggctgttcaatcttgcctttcttcctggataaaggagagaatgaggccacttggtagtggtcaagccctggggaccaagccttccatggaggggttcttggtaagttttaggttgtattacctgccctttaagcaggagtgaattacagtaacccatgcctttgtaaatgcctagaatttacaggattccgatgagcgcttcctgaatgcacagtgttctccagggcagttgattttttaacttagtctaaggcagtggttctcagctgggggtaattctgcccaccagggcacgcttggcaactactgaagacatttttgactgtcatgatcaacactagattgtgtagttgcatccagtgggcagaagccagggatgctactaaacatcctatagcccctcacagaaaaaaaataacctggccaaacacgatagtgctgggattgaacaacactgcttttttttttttttttttttttttgggcagagtctcactctgttgctcaggctggagtgcagtggtgtgatcttggctcactgcaacctctgcctcccaggttcaagtgattctcctgcctcacacccccgagtagctgggattacaggcacacaccatcatgcctggttaattttttgtacttttagtagagatggggtttcaccatgttggccaaactggtgttgaactcctgacctcaagtgatctgcctgctttggcttcctaaagtgctaggattacaggcgtaagccactgcacctggcctgagcaacactgctttagaacaatgtgaaacaatatcagtgatgacggaaatccctgtctgattacatatgctaatgggagttttcagcctggtatagcggctcatgcctgttaccccaccacatcgggaggccaaggagggaggatggcttgagcccaggagttcaagaccagcctgggcaacataatgagaccccccccccattctctatataatttttttttgaacttgaaaattggcctggtgcgttggctcacgcctgtaatcccagcgctttgggaggccgaggagggcgaatcacgaggtcaggagatcgagaccatcctggctaacacggtgaaaccccgtctgtactaaaaagacaaaaaattagccaggcatggtagcgggtgcctgtagtcccagctactagggaggctgaggcaggagaatggcatgaacctgggaggtggagcttgcagtgagccaggatcacgccactgcactccagcctgggggacagagtgagactccatctcaaaaaaaaaaaaaaaaaaaaaaattaaggctgagcacaatgactcacacctgtagtcctagcactttgggaggctgaggtgcaaggatcacttgagcccagtagttaaagaacatcttgggcaacatagtgagatgccatctctatttaaaagaaaaaaaaattttaaaaatgtaaaaattaaattgaaaaatgggatttttttcaaggagaaaaattaggatttttgtttgctttgttttgttttaggagataaggttttgccatgttgtccaaactcatctccaatgatccatccacaaagtgctgggattacaaatgtgcaccaccgcgcgtggtggccccttttttttttttcatgacggagtctccttctgtcgcccaggctggagtgcagtggcacaatatgatcttggctcactgcaagctccgtctcccgtgctcatgccattctcctgcctcagcctcccgagtagctgggactataggtgcccaccaccacacccagctaattttttgtatttttagtagagacagggtttcaccgtgttagccaggatggtctcaatcttctgacctcgtgatccgcccgcctcagcctcccaaagtgctgggattacaggcgtgagccaccgcgcccggatttttttttcttttttaaagagcgacaggttcttgccatgctgcccaggctggagtgcagtggtgtgatcacagttcactgcagcctcgacctcccagactcaagcaatctcctgcctcagcccttaagtaggtggaactatatgcgtgcacctcctcacctagctaatgtttgtactttttgtagagctagggggttctccctatgttgcccaggctggtctcaaactccttgcctcaagatatcctcccgccttggcccccgaaagcactgggattacaggtgtcagtggcatctcagagtctccctctgtcgcccaggctggagtgcagtgacacaatctcggctcactgcaacctccacctcctcggttcaagtgattcctctgcctcagcctcccgagtagctgggactacaggcgcgtgccaccacgtctggctaatttttgtatttttggtagagacggggtttcaccaccttggccagactgttcccgaactcccaacctcaggtgatccgcctgcctcggcctcccaaagtgctgggattacaggcgtgagccacggggctcagccaaaaactcagtattttgtgactgtagtccctgctgaccccatccctcacccccaccccacatgccagggttcacttacccgtaggaatggccaatgagcacatttcgcttcttggcatagcgcttgaagattgctcgcatgtcctcagccagcgcatagaaggtgtaggctgcggccacctggggcgcagagctggccccgtggccggccaggtcaggagccaccacctcatagcctaggcgcacaaagaagtccagctgctccttccagatggccagggaaccgccgacaccatggatgaaaaagagcaccacgtcggcctgggcgcctttgcagctagtgatgcgcttctcacagtcaatatggatggtcctcttggggcgcctggctcgccgccgccgcccaccactgccactgccgctgccgctgcctgcgctgccgggggccaagcggccatcgctgcccgccggatctgccagctccacctccagggcggccggcggctccccagagccattctgcccgtgtaggaggtcggctcgaggggctcggcccaggttttccaccagcaaccgcccattgcggtacacggtgatccggcgctgacagcggaccaagccggagaggtccccctgggctgcatccgaggatgcggatgatggtggaggtggggcagcggctggggcgggtcctgcatgcttcacccgcagcacgcggccgggcttgacctctacaaaggtgtagccatcgctggactcgacgctctccagtggccccacggcgttggggggcgtgcccagcaggcaacagaagataccgtcggtcaccccggtcagcatggtgtgtcctgtgagtgaggacagcagccagttcaggtgctgtctcaatgagaaccctgcaccgtgcagcaggcactccctgagccttgggagaactgttttagactccagtttggggagcgccagatcaagtgagccacggcactgagatttttttgtttgtgtgtgtgtgtgtgtgtgtgtgtgtgtgtgtttttgagacagtctcgctttgtcatccaggctggagggcagtggccggatttcggcttactgcaacctccccctcctgggttcaagcgattctcttgcctcagcctcctgagtagctgggattataggcaggtgccaccatgtctagctaatttttgtattttttgtagagatggggtttcaccatgttggccaggctggtcttgaactcctgacctcaaattttcctcctgcttcggcctcccaaagtgctgggattataggtgtgagccaccgtgcactgacatgttttgtctgagcagtgcctttgtggtagttaccctcctgggtcaccctagtctatcctcagagagaaagacttggctatggcttaccccacagggtgtccacagggaaggtggtggcgtcttgtgtggggatgttcctggagaaggggacattgtggcaaatgtggaccagccggaagacaccccctccccccagctggagtttataccatttatggcctcctaactcattcattcaggtatacactaactcatccattcaggtatacactaactcattcattcaggtatacactaactcactaactcatccaggtatgcactcactaactcacatatccccagggcctcctaaggcatctaaaatatgcaaatctttggtgagcccccagtgaggctcctggctctgaatttgactcctgaaaggtgaggccctaggagagggggatggggactgagccacagaaagccttgctcagctcccctagaccggggtgagccggggtctgtttcatagagggccaagctgaggcccagacactctgagaggaagctagactctgaacttcctccttggcaccctggattctggggatctgctatacaagtccccagaggtggcgaagaggatgggagaggcagggccctggctgggggcctccaagcctccatcccactccttgggccacccccgcccccgtgtccatggcaaccacaggcggttacataacctaagggggggatacccgagcagtgcacccccattgtcgaggtgtctagggcctggagatgggaccagctgcctgcctgccccctaccccaggttgggcgccgctaaggtaacgcacgcccgagactgagccgcagtggccccagacatactggaggggaagcaggccatgccccccacctcgagtggggccctaatcccggattgtggagggcaacgcacaggcgccaccccagccccgcttccccgcccccggcccccgccttccaggtgttcgtcatccctgcagcggggtcgagcccactggggctccgtggcttcctacgagcccaaacgcggggttggtggacaccactcctccgaagtggaggccccggggcttcgatctctccttttggggcccgttccccgctcacctcatcgagggccgcggggcccgggtcggggcggaggggtcccaggcggagaagccagcgtccgcctgctggcgccgtttacatggtggcgcggggtcaggccgggtgcgtctacgcgggcgggcacctgcccctggcggtcagcgcaggggcatcccgcggccgccgaaacagccggccctttaagttcctcccccgagtaggcggagccacgtgccgacgggcgggcacttcggcctatcgcagctgcggactgacctggcctagttaggagcccaatgagaggcggcaattccgtagtggaggcgggctctgggagcaacggccccgccccttttgggggttcaccgaggttgggggagggatggggcctggctcaaggcggagaagggggttgcagtctagggtctgcgggacgcctgggagtgtgcggccggggccctctctctgcaaatgggtctcccaagcccttgccccccagcccctgcctcccaattgccctgttcctctccaaacgaggcccccatactcttctctctgtattgacctttccattctagaagcagagactccaagatctttttccaatctccggtggggaaactgaggctcataaagggcacaagagcataaatcaagcaaggagcaaagctgggacttgaacccaaggctgtgtgattccaaaccctgggaaccattatttgctaacctcccccctacgccccccccttttcttttggtagggacgaggtctcgctatcttgcccagactggtctcgaactctgggcatcaagcaatcctctcgtctacggcctcccaaagggctgagatcactggcgtgagccatcgtgacgggcttctctaaagctttcaaggaaagtcttggagctgtgggtaattagagagtttgaatttcataatcagccgatttaacccatggctgccatggttctgagaagggctgatagcaagaggcaggcatcccagctctgtggtaccggcggggccatggtaggccctcaggagagctcaggtctcaaatccagcctctgccctttgctgatgtgtgacctcgggcaagttacttcactttcctgagcctccgtttatttctctatgaaattaatcctctcataagtttgctacgcaggtaaagcactcatcatagtgtcgtgcatataacaaatgctccatatattatgggcattattatagtggtgatgttttgctaaacgatgctacaggtaggatgggcttcggaggacgaggggttaaatgctccttgctgcttggccactcacatcccctggaatttgctgccagagctggattccgtccagacacctactcttgcccactaagggcacttctgggagactatacagtttattcatttagcaaacacctctctgcatgaaccccaagctggcacttgtagggatacagccccaggcccctggcccttgaggagcccttgaacttgggggagagtcaagggaaagcagtcgggccagaagaatggacagcggttgagagaagacgactccttttttttttgagaaaggatctcactccgttgcccaggctgcagtgcattggcgctatcattgctcactacagcctggatctcctgggttcagggaatcctcccacctcaccttcaagtacttgagactataggtggttgctaccatgtccccaggctggtctcaaactcctggccccaagggatcctccctcctcagcctcccaaaatgctggaattacaggcatgagccacacctcactcagcccttggagaggaaaggatttttaaagggcggataggggaacaccaggcagagaggagagtgtggctgaaatgtaagatggtgtgtgtagagggttttgcatgcctgatggaagggctgagcaggttttacctggggaaatggggagccaaggatagtgtgtgagtaggggaggggttcagatctgagtatcagaaaatttttcttccttttttttttttttttttttggttctaacaacagaggagaattcttctagggcccaaaatgggggcaagattgccaaagacaagcttgcaatccctgagtttacagattgagaaagcccagagtggcgcagggaccaccccaaggacacgcagcgagcttgaactcaggcctcctcggcttcctgccaagaggcggagacttggctgcagccaggacaagctgccagccagctgtgtgccatctgcccagctcccgctgggggcgggaagaccaaccagccgcttcctgcagctgccaccagctgcgcccggccaccgcggggcaccctctgccggtcaataggagagagaactacagctcagctgccagctgaccgcgggagataatgccttgtgcgcacgcgcttgctcagaaggcgccgttcgccggctacctgttggtgtgtatgcagagcatccctgtgccccgcggatatagactggcgcgcctctgttgcgcaggcgcagaactacaacttcagggttttccccaacggcctcttttttgcacgttaggagaaactacatttcccataatcctttgttccagggctggagcggctctgggctccggaatcgcccgcagccggtactgcgggacccactgcggatatggctgtcttggctggatccctgttgggccccacgagtaggtcggcagcgttgctgggtggcaggtaagtcctcagggggacccttccccaaatcagggaataagggcggcttcggaggctggcgccactcttcactgcccgcgtgacctgccagtgccttgcgcattttgcagccaggctctgtctccgggagccgaggctcagagaggttgagcgccaaggtcacccagcgccccgtctgacctttctcgccgtccctctacccacgcaggtggctccagccccgggcctggctggggttcccagacgcctggggcctccccaccccgcagcaggcccggggcaaggctcgcgggaatgagtatcagccgagcaacatcaaacgcaagaacaagcacggctgggtccggcgcctgagcacgccggccggcgtgcaggtcatccttcgccgaatgctcaagggccgcaagtcgctgagccattgaggatcgcgacgcagtcggcgggaccctcatggaagcatcgccctcgcctcggaccttgcctggcgctatttttgcagggagctggggagcaggaacgcctcggacctgagtgctctccatattgtggggttgaagtctggatgggagcttgccaagtccctttttaggctttttaattaggaagcatttcgaacctgcgcaacagaccaaagaacagtacaaagaacatccgtgtacccagtaccctgactaccgactacctacaacccgtccctgccccatcctgagttcttttgaagctgatctcaggcatcggattatttcttctgtaaatatttcagaatgtatctctccaagatgagagctcattaaaagacaattacaaagcttatcacatccaaaagaattatcaataattttgaaatattattaaacgtgtaataaatgttcaaagttccacttgccttatatgtgtcataactcttttttttttttgagacagtttcccttttgttgcccaggttggagtgcaatggggggatctcggctcattaaaacctccgccttgcgggttcaagcgattctcctgcctcaccctcccgagtagctgggattacaggcatgcgccaccacgcccggctaattttgtatttttagtagagatggggtttctccatgttggtcaggctggtctcgagctcccgacctcaggtgatccgccctcctctgcctcccaaagtgctgggattacaggcatgaaccactgcgctctgtcccccaggctggagtgcagtggcacgatctcggctcactgcaaactccctctcctgggttcaagcaatctcctgcctcagcctcccgaatagctgggattataggcgcccaccaccacacccggctaatttttgtatttttagtagagacggggtttcaaccatgttggccaggctggtctcgaactcctgacctcaggtgatctgcctgcctcggcctcccaaagtgctgggattacaggtgtgagccgtcatgcccagcctgtgtcataaattttataggtctgggaagactggtggaaaactgtgtgtgtgtgcgggggggtgtttgtttttgaaacagggtctcgctctgtcacccaggctggagtgcagttgtcggatccctgcttactgcaacctctgcctcctgggttcaagcaattctggtgcctcagcctcccaagtagctgggattacaggtgcatgccaccacgcccagctaatttatgtatttttagtagaggggagtttcaccatgttgaccaggctggtcttgaactccagcccataaggagtttgaatcttccacttgtcccttggggatgtttgattttgagcaagaatttaacactgtgaggtgcatttgtcgcctataaaatgcagtgctggtttctcctctgctctgttgctgttggagtaataatacttagtagcttccacttagcaacttcactgtgcaattgctgtgtgctgggtgcccattctttgccctggaagtcaggaaggcagtttggacacagaggtgtcagggctgggagggggattgtgagggctgtaggacttcagggaaggtacctgacttgcctttttgaagaatgcagtcagggaagtcttggaggaaatggcaaggtctgggagagcccagacatagaaggaattggttagaggtgaggacacaggtgggcaatgaagaccgcaggtgcccataaatggggccaaggaggtgggattgaatactagggagttacgggaggtggttgagcaagacggtgtcgaggaggagctagggagtgttatggttcttatcttctagggctgctttaaaaacgtaataaacacaagaagatgccggcacgatggctcccagaactttgggaagccaagtctggaggattgcttgaggccagaagttcgagaccagcttgggaaacatagcaagacccctgtgtcttttttttttttttcttttgagagggagtttagctcttgttgcccagactggactgtagtggcttaatctcggctgactgacacctccgccttctggttttaagcgattctcctgcctcagcctcttgagtagctgggatgacaggcgcccgccaccacgcccggctaatttttgtattttagtagagatggggtttcaccatgttggccaggctggtctcaaactcctgacctcgtgatccgcccgcctcggcttcccaaagtgctgggattgctgggattacaggcgtgagccaccgtgccccgcctttttttttttgagacagagtctccctctgtccgccaggctggagtgcagtggcgcgatctcagctcactgcaagatccgcctcactcacggttcacgccgttgtcctgcttcggcctccggagtagctgggactacaggcgtccgccaccacgcccggctaattttttgtatttttagtagagacgtggtttcaccgtgttagccaggacggtctcgatctcctgacctcgtgatccacccgcgtcggcctcccaaagtgctgggattacaggcgtgagccactgcgcccggctggctttttttttttttttttgagactgattttcgctcttgttgcccaggctggagtgcaatggcacgatcttggctcactgcaacctccgcctcccgggttcaagtgattctcctgcctcagcctccctactagctggaattacaggcgcagagatggggtttcaccatgctggccaggctggtctcgaactgctgacctcaggcgatctacccgcctcggcctcccaaagtgctaagattacaggagtgagccaccgcacccggccgaacctcgcatcttaaaaacacacagacacacaaaagctctagagagcctcgcggagctgtaaactacagctcccaagagacttcgcggccgaggcctccgcccacttccggatctcactttcattgcttccaagtaccgggaggtgctttgcttcttcaaccgaacttgaccacaatgggaggaggcgtggcaaccaatgggcgcatgagttagctggatgcggccaatggaagcgtgcaaagcgctcctatgtgggggcggggctagactgcacaccaatgacagggaggtggtggcgccatcagtgtgggctgtgccgtggctggaagttactgtgaggcggcggctaagaaggcggctctggtggcggcggtggaggctgaggcggcggccgaggcggcgacggaggaaacagaagatggtgaggatggcctccaggcccccactccccctctgctagacaaaatggcgctgtggtcccacccacctctagtatccccctaggcccctctccgttctgcccggtcccctcaggtccggcccgcccctcccactcacctgtgaccttcgacccccggaccctaccgagagcttcctgctgatcccactgccactccttctccgacccctgaccccatccaggataccaagccctgacaactcattcatttccgggttgcggctccccccggaaatcgtctggggtggggatggggtcccgtaagaccccctggtctggcctcgttctcagcacgccggacctggatctcttcagttcaggagaatttgggaggccggcctgggccccggggcgggggagggggcttggcaccgcgatatgcagggctttgtcgccaaaggaagtgcgacatcgccgattgtcccggttccccgggccctgaccccacctccaccattctgggcccttacccgcctctaagaatgaaaaacttttatctccgatccgcatggattgtccctgtgaaatgagggtagcagtagtctgaacctcttagggtggtgacaatttaggtaactgacgtcgtaaaggactcaggatagtgaatgctcaacagatgagctgggtgactcgaggccagtgacgttctcttctagctgtcccctcattatgaagtgtggatcgtccccacctggctgttggaaggttgaaattccttcagggttcctcagtcatcctggaatttgggtctggtggttcttcggggttcagtctccccacctgaaaagtgggatggtgacccaccctcagagtggaactaaagcctctccacaacccccattagttggcatcctgagggctgggaagggtgatgggaagcttggtcaagatacctcaagtctcctttgtcccctgacccagagtcccagcccacaatccacagtccttgggatgtggtggggatgaaaggaagactccctttcaggaaggaaatgggaaggtgggttcctagtgtgcgggtccccaagcctgggagttgtccttgataccttggtacagtctcatccctacagccaatcataagtggattagattgtctctgccttctgaacacacctgaattcatccatggcttcatgccctgttgcaggtactgccacttcccacctgcatacctgtcccagcttcttccctggtctcctagccttgctctcacccctttggcagttcataattcacctgaaccagaaggaactttttttttggagtcagggtctcactctggcgcccagactggaggctcaagagatccccacaccaggctcatttttgtactttttggagagatggggattccctatgttgcccaggctggtctcaaactcctgggctcaagtgatcctgcctcagcctcccaaagtgctggtattacaggtgtgaggcactgcatggggcctgagaaggaggttgttttttttttttcttttgagatggagtcttgctctgtcgcccaggctggagtgcagtggcatgatctcggctcactggaacctccgcctcctgggttcaagccattctcctgcctcagcctcccaagtaggtgggacccaccaccatgcccggctaatttttgtatttctagtagagacaggttttcaccatattggccaggctggtcttgaactcctgaccttgtgatccacccgcttcggactcccaaagtgctgggagtacaggtgtgagccactgcgcccggccagaaggagcttttaaagatgtgcatcaaatgataccactttctagcctataaaatgctccaggaaccctggcggctcccctcctcaccctgaggcccctggccacctctatgaccttatctccactctcttctccactctgtctgtgagcttcagccaccctggccttgttttcacttcctcacactccaggttcctgctaccccagggcctttacacctgctgctctttctgctcggaacactcttcctcctgtgatcgaggtcattcctgactttggggggcccccagttctctgctattagtgtactgcttctctttctcatctctttgttgggtctctggcaggctacctgcagtgggactggcacacaggtgtccagtgcgtgtctgctgaggcacctgtgagggcccagccgtggctggcatttgtctggaatgaggcctcccccaccccctgcccccatgtctcgaggccttgttttccagcttagcatgacaggaaggctgcacgtaccctgccttcattcatttgtccaacgcagacatgttgatcctaaaggctgcccctgagggagctctgtgcaaagcattccccttgttgtcttatgactcagagtaaccctgggaggtggccctgttggaatgcgtctcttcacagggaggcccagaggctgggaagtccctcgtcccaggtcacacaaccagggacgggctaagccaggattgagagcagaatgcccggagtacctgcacctctcgccactcagccaccgggccctgtgtgagcccggccagggttcagtcagccctgtcctgtcctcttcccttggggaggtaccagtccagccagggaggtggacatgtaagcagatgacctcgccggggtgtgagggaggctctgggagaggctcccgaagtgtcgggggaacaaaggggccagggagggtgttggagctggtggggaggttagcaggtatttgccacatggaggcatgaggggcattcctagagggtgtgtgtggcagagggtgtgtatgatgggagtccagcaggggcaagctgggccagggctgcgaagggggacagggacccctcctcacccttcaggtctcagtgcctgcatccctgcgtctgggcagccctcctttatcccctaaatgggccagagctctgccttgcacctcacactgcgccctcgaggcaccctgtcctgcagccgcttcctgtgcactgtgcagctctttgccccacaccatctcaaggccaggcgcgtggccatggtggctcagtccagtgccctggtgcctgctagggccccagaagaccttgctgaatgaatgaagctggccccagagccgggtgctgagctgaggctggcatcctagggtgggaggggaggcaggtttgagggactttgaacaggtcctggggcagtaggtcatccagatgtgacggctgcctcccgggtgggagggggaggcccacccagccacattccggcttcccgagagggaccagcagaggaggggccagatgtcatagaattggggacactgctgttcctgcctgtcccagagggtggtgggaaattgtctgaatagcagcttctcccagggcagctctcttgggcctcaggcatcaggggatggccttcccttccagctctgtagcctgcaggggctctggcttttgcttttcaggtgtgtgatgaagagaaggagcttggcttctgaggtggggtacatgtgggttcaaatcagccccctggttttctgactgagactgggtaacctctctgcctcggtgtccttgcctttgatagggagacactacctcctgccccattgggtcaggagatcatacatagtgagctcaggagggccccgttcagggcaagccatgtggagagactcgcagcagacagtcccaccactggcccactccagacctcactcacagggttggattgaaaatggctttttttttttttttttttttttttttgagacagagtctggttccgtctcccaggctggagtgtagtagcacaatcatggctcactgcaacctctgcctcccgagttcaagcgattctccagcctcagcctcccgagtagctgggatcataggcgcgcaccaccacgcccacctaatttttatatttttagtagagatgaggttttgccatgttggccaggctggtctcaaactcctgaccgcagatgatgcgcccgcctcggcctcccaaagtgctgggattcaggcgggagccactgcggtatgacttttaaccagtggcctgttctcttgcagcctcaatttccccacctctcacctaattagggggctgtcatgaggatcccgtgggggatgtgcacatagcctggcctggttacttttctgtggtcccgacagtgtatccagcagccagctcaagggtgtgttctggaaaacttgaactacaaagaatagtgggaagaaggaacccagcagtcaccctgcaggtgctccagggatgagctggcccttgcctgttttctcatgtaccatcttccatgtcttctaggcagattttttgaaaggactgcctgtctacaacaaaagcaattttagtcgatttcacgcggactccgtgtgcaaagcctcggtgagtgcgtgttcctgggactgggaggaattggtcacttccagggggcctgggggcagcttgtgtcccccgattggggtcttggctggaacagaggctgatcttcaagcccagccccatccacatacttgagtgtcttccaatctgcactgaagggtgggtgctgagtggagggatgaggagaccccaggcccatgcactctcctaacccaccccttctcaaccctcctgcagaaccgacggccctcagtctacctgcctacccgcgagtacccgtctgaacagagtaagtggccgctgtcagtctgtcccattctggctgctgaggggcggggtttggtgactgcagcgtggcacgcggaggttatcttcaaccccggcccaggccatagacttggcttgggttcacacgctgtctactgaatccagttaagtcagggagggcctccagggaggtacaggagggggaccttgggggcttcagcctggggatgcacacgtggatgcctgtccactcccagcccctggggacagccagaaacctggctttccccaggtgtctcttgattgggacacactgggatccacagccagcccaaaggggcccccaagttgtccctcatctgccactcactggtcctttcccctccctgtcagatgaggtcaagcgagaactctggttctaagacaagtgctatcgggcagagaggcagcagagggctacaggggcttgggctggggatccagccaagcctgggtggcagtgatgggaagggggtccaggcaaaggggcccacagcacaggaggacttggtcttgctgtcttagtttaactgttcaaaaagactccacaccaggtggggtagctcccgcctgtaatcccagcactttgggaggctgaggcaggaggattgcttgaggccaggagttcgagaccagcctgagcaacatagttagaccctgtttcaccaaaaaccatatatatacgtatatatacacacatatatatacacacacgtatatatacacacatatatatacacacacgtatatatacacacgtgtatatacacacacgtgtatacacacacgtgtatacacacgtgtatatacacacacgtgtatacacacacacgtgtatatacacacacgtgtatatacacacacgtgtatatacacacactatatatatacacacgtgtatatatatacacgctatatatatacacacgtatatatatacacgctatatatatacgctatatatatacacacgtatatatatacacactatatatatacatacgtgtgtgtgtgtgtgtgtgcatatatatatatatatatatatatattagccgggcgtggtggcatgcatctatagtcccaggtgggaaaatcagttgagcccaggagctccaggctgcagtgagctatgattattccagcctgggtgacaagagtgagaccctgctcttaaagcatttatccatctggagcctgtggggtgggactgtgtggtcactgggcacagatatgcggtatgtgctcctagtcagcctgggagaaacataggcatgagagtctcagttgcggggcttggtcccccaccaagggtggaatcccttgcagggagccgggaccctgaaagcagctggctcaggcctctgggagtagctgcgagtgtgctcagaagcaaaaacatgggacttttggagatctctggagttgggggtactgagttccagccccaaaaagacctcccagggcagtgtcaggggaggagcctggggaggggaggcgtctgcgactttctctatctttcctccttagtcatcgtgacagaaaagacaaacatcctcctgcgctacctgcatcagcaatgggacaaaaaggtgaggcccacagggctctggtgcagggattgtgggtggacagagactgggcacctggcaggggcttctgagcacaggaaggactctagtgattggagcagggccttgagggctgggtaggagtgccctgggcgatccaggagagggaagagcgttccagtggagggaaccgctgtgcagaggccacaggacaccagtgctcaggaggctggaggccaggcccaagtagccgccaggcccagttttccatggctctggcattaggtagactgtattggtatgaactagatagaatattttctgaggccgagtgtggtgacgcatgcctgtagtcccagcgctttgggaggctgaggcgggcggatcacgaggtcaggagatcgagaccatcgtggccaacatggggaaatcccgtctctactaaaaatacaaaaattagctgggcgtggtggcacgtgactgtaatcccagctacttgggaggctgaggcaggagaatcgcttgaaccagggaggcggaggttgcagtgagccgagattgcaccactgcactccagccttgttgacagagcaagactgtctcaagaaaataaaaaaaggccgggtgaggtggctcacgcctgtaatcccagcactttgggaggccaaggtgggcagatcatgaggtcaggagatcgagaccatcctggctaacatagtaaaaccctgtctctactaaaaaatacaaaaaaaaattagccaggtatgctggtgggcgcctgtagtcccagcttcttgggaggctgaggcaggagaatggtgtgaacctgggaggcggagcttgcagtgagcctagatagggccactgcattccagcctgggcaacagagcgagactccatctcaaaaaaaacaaaaaaaacaaaaaatcttttctgaatggtgaaatgtgtacacatgattaaaaatctcagctgggcgtggtggctcacacctgtaatccccgcgctttgggaggcctacgcaggcggatcacgaggtcagaagtttgagaccagcctggccagcatggtgaaaccccatctctactaataatacaaaaattagctgggcatggtggcgcacgcctgtaatcccagctactccggaggctgaggcagaagaatggcttgaacctgggaggcagagattgcagtgagccaagatcatgccactgcactgcagcctgggcggtctcaagaaaaaaagaaatctataccgggcgcggtggctcatgcctgtaatctcaggactttgggaggccgagtcaggcagaccatgaggtcaggagatcgagaccatcctggctaacacggtgaaaccccgtctctactaaaaatacaaaaaattagccgcgtagctgggtgtggcggcgggtgcctgtagtcccagctacttgggaggctgaggcgggagaatggtgtgaacccaggaggtggagcttgcagtgagctgaaattgcaccactgcactccagcctgggcgacagagctagactccatctcaaaaaaagaaaaaaagaaatctaggtaacatgtgagggtgtggctgggtgtggtgattcacacccggaactgcctgagaggctgacgcaagcagatggcttgaggccaggagtttgagaccagtctaggcaacacagcaaaactccatcactaaaaaaaaaaaaaaaaaaaacaaattagctggctgtggcatgttcctgtaatcccagctattcaggaggctgaggtgggaggatcgcttgagcccaggaggttgaggctgcagtgaatcatgatcatgccattgcactccagcctgggcaacagaaccagactctgtctctagaaaataaaaataagagggtgtagttgcagcgaagagtcatctcccgcctcccgcttctggtgccccagctcccttcccagaggctgcctctgcacacgggatatttttcttctttttctttttcgtttttcattttcttttgccctgccctgccctgcccttcccctcttttcccctttttttccccctttttcctttcctagatgaggtcttgctctgtcacccaggctggagtcgcccaggctggagtgcagtggcgtgatctcggctcactgtaacctcctcctcccagtctccacctcccaggttcaagcaattctcctgcctcagactcctgagtaggtgggattacaggcacgcgccaccatgcccagctaatttattttattttatttatttatttttttgagatggaggtttgctcttgttgcccagactggcgtgcagtggcgcgatcttggctcactgtaatctccgcctcctgggttcaagcgattctcctgcctcagcctcccgagtagctgggattacaggcatgtgccaccatgcctgattaattttgtatttttagtagaggcggggtttctcgatgttagtctgacttgtcttgaactcccgacctcaggtgatccacccgccttggcctcccaaaatgctgggattacaggtgtgagccaccatgcctggcctaatttttgtatttttagtagagacagggtttctccatgttggccaggctagtctcgaactcctgacttgaagtgatccacccacctcggcctcccaaagtgctgggattacaggtgtgagccaccgcgcctggccttctttttttttttggagacggagtctctctgttgcccaggctggagtgagtgcagtggcgtgatctcagctcactgcaacctccgcctcttgggttcaagcaattcttctgcctcagcctccagagtagctgggattacaggcatgagccaccgcgcctggcaagtttgttttttttttttttacctaacattgaacagtgggtggctgcctaccctgcgcaaagttggaaggtcgggggactgtgtggcaaagtgactgcttctgaaaatccaagctgctgggcccacccccaccccttctcctgccccccaggacttggtttccacagcggggaaggaggcgtgtgcttctgtcttgcgttgatgtgcggcatccccagtggcttccaaaggccctttattcccaggctgggtgggttgctcctctgagtgcttgagaaaccagccctgtgtgggtcattgcatgtggtgggggtgactccgggtgccaggaaacacctgtctatcaccaggcatgggtccagaaagtgctctgggcagggcttagtggggcaggtcctggtggtaggaggggctgcctagccagggaccctggggccccccactgtactccaggcctacctctgtgatgctgctgcaggggcctgggctggcattatgactctgggagcttcacccacgtgaagactcacagcctccagctgggcaacatagtgaaacccccatgtctaccaaaagtaaaaatattaagcgtggtggtatgtgcctgtagtcctagctactccagaggctgagctgggaggattgcttgagcccagaaggttgaggctgtccgaaaaaaaagactcacagcccctctcttttccctgtcccccagaacgctgccaagaagagagaccaggagcaagtggagctggaaggcgagagctccgcacctccccgcaaggtggcgcggaccgacagcccagacatgcacgaggacacttaagactctcaactccacaggcgcctcctgccaggtctgctcctcggtcgcccacccgcctgcccgccatgtgtaagcaccccgcccgcccgcctccctgccggcccatccacaccctgcgtccacaccacttccaacctcataggagccgatgtatttattttccttgagtttttatttatgctgtaacctgtatcaagcgttggttaaaggggacatcagacccagtagtgtgatgttggtagatgctttttaaaaaaaacaacattgtccccccgacccccgccttccatcgggccagttccccgattcctgcccccagttctccagagaaccagagtgtgtctgtgagagtctctagcgggggctttactgtggccgggcgacaggggcgggcccggggtggcctgacctaccaggacagccgagtggccttctcccccccaacaccggtccaggccattgagactcggtcttgtcccacgcttcgcccggaactttcccatgcccaggcctcactcagcgtgcacgcacgttggggagaagtcggcccttgggatctttctcttgagtcattttatttttatcatggactagtgcgtgctccgtgtccaccccaataaaagggtctttcctacttgacctcgcgtctttgctccacacaccttggctgcagaggacggagcccctgggagtcatccctgttgtcaccaagaggagtgagaagggccccccacgccaggggccccaggaccggctggattctctcgtgggcttgctgaggccaccatgttcaaggccaagacctgcctggaccatcccctctgcctctcctgtcaaggtgaccccaaggacaggtcattcctgagagacggtccatggtgccaaggatggagcggggtcagccccctgcctgggataccgccaagcagggcagcgcacctgtcagacaccgcagagatggccggcctcatccgggggcctggggtctctggcctctgctgctcccctgaggcatggtgacagtacagacggcatctggccggtcttgctgtcctaggtggtggcctcacccttgctgggtcatagaggagctgtacagaaggttggcacctggcagttggcatgtgccatggccgctcatggggacccctcttccgccagctgggctgggtttggggctgagcttgggtatgtaggggtgttcgggctctgggcagaaggtttgtggccctgaccactgagcctggggctgggggaacaccgcttctccccttattgcccccactggtggtggtggggatctcagttttcttttgttttgttttgtttgtttgtttgagttggggtcttgtactctttcccaggctggagtgcagtggcgtaatcacagctcactgcagcctcgacctcaagccttcctcccacctcagccttccaagccgctgggaccacaggcacccaccaccatgcctggctaatttttttttttttttgagatggagtctcgctgtgtctcccaggctggagtgcagtggcaagatctcagctcactacaacctctgcctcccaggttcaagtgattctcctacctcagcctcctgagtagctgggattacacgcgtgcgcccctacacccagctaatttttctatttttagtggagacggcgttttgtcatgttggccaggctggtctcgaactcctgacctcaggtgcttcgcctgcctcggcctcccaaagtgctgtgaccgcacctggctgcctggctaatattttaaaaattttttgtagagacagggtttcaccatgttgcccaggctggtctcaaactcctgggctcaagtcatccaccttcctcagcctcccaaagtgctggggttacagacgtgaaccaccgtgcctggcagaggtctctgttttgagagctgagtctgagggcgttgggatggtgtagggttgggccacagagctagcagacactccgggctatggagggtccgcctgccccagattccactgtggagggccctgcctgtgtcagaccctcgggcctaggcggcccatctctcccaaggacggagagtgccagggtgggctcccgtcctacacaaggagtggctgaccaggcccaggcacagcacagccaccctgctgtacctcccagctcccggcagtgtctacaccacagtgatggtgctacaggggccatgtggtcacaggacaggtggtcaggaaatgcacacttgactgcggtcgatggtgccgggtccggctgaatgccctggaggctcccaggccagctggggagtcccagtccccagggttggtgtgacctgggcaggcctgcggtgtccatctgtgaatgactgagatggtgggacttcagcttccaaggccaggggccagagtgggagcagggggcactcccgcctttcccctcggcctgtctagacctctctggctcccagtttctgctttgagtggctgggggctgtctcctgcctgtgctgtctgcccgtcgctctgcagggctgctgggcgggcacctccttcccctcccctacctcagctccctcctttggggtctgagggctgtgccccagcttgcctccctgtggcctccccctagaacccctgggtctgtcgggacatgccccacctggcacacacaccctgtgtagctcccactgcctgtgggaggacgctgggcccctgagccggcctctgtctacccctcctgcctttggggtcccctttaccccactgttcccccaaactgccttccaccttctccgcctttgcacaggctgttctcctgcctccagtgaactctgacttctccacagcctcccaaagggccccttgctcacactggcccagccctgcagcatggccatgttggtctctgagccttaagcctttggatgtggacacatttgtcctcttcctgaaaaatgtgagggtctgagaggccacgttcctgttcctgagtcatacgacagagtcccagtgacttgggtctgatgtctgtcccacagtgggacatccctgctgcatcccaatgccaccccgtgtcctggggacacccaaatgtgccattctctcagtatcacaagtcggggactgcaggaggctcaggtgccaggtgccttctgatgttcatgccacaagctcttcccactgtctctggctccccagacgatgttccaggaggcgggtgtgccagaaggggccacgtcttgcaaaccaccgcgctgtcctctttgagaaggagtcttactcaggactggggcctgtgcacacattgtcgcctcttttcagcacttagagattccttcctttgtctagtggctgaagccagggctgaagttggcctccaaatctgggccgtctcagaggcggcgcagcctggagttttccatctgtggccaagacccagtttttgggaggaggccctcatgggtcaagccagcctgtaccaggatggggggagggggttcccaacctaggccccagccacccagactcccccacccccactcccttttccactgctctgacctcgggcactgttgaaatatagtttttattgcatttctgccgttttacaaaaatatgacaaaataaattaaaaacaaataaataatcgcctgttctgtgtgtgtgtgtgtgtgtgtgtgtgtgtgtgttttctgttggatttgtgggtttcctttcgtttggaaaggaaaacggcagatggggggcaccgaccaatactgggggccctcgggggctgaagcgcattttgcattttggagaccggccgcccctgtgaatgactgatattgcatatgagaagagaaggcagggcgggtagagctaatgccagccgctgggccagcacacggcctgggggctggggctggggctaggggagggcgctggggtctcgaggggatccgaggtgggcggtagcggtgggggcgggaggctgtaaaagctggcgtctcccggcaggggctggggggcgggtgggggcccggccatggcacagggtgggcactcggcagcggccagggcctggcggggggcggcaccctcgcccccgcagccccagggcccgtcccactgccagcagcctgcgggcggtgtcgggggccggggcagcggcattggcggcggcggcgcggggctccggctgcggcgggtgcggagggcaggggcgcccacgggggccagcgctgtccctgcggaggcgagaggggccgttccggggggatgccgcccccgccggaccccgccgggctggcaaccctgcccgcgctccctcccgggcatccaggcacataaaggccttattgcttctgatcagagactgaggtggggcggccccctgggcggcttccggtgcataccctgcctctgggcacggccctgccggtcacagggggaggacagtttgaggaagtccctctggcttctgacctatggcccttgtgctgcagctgccacctgttgggctccctgggaatggggttgctggagcccaggctgggattggggcaggggaggtggtgggggtgggagggtaggggtgaggcctgcacctctgctcagcacatgtgggagctccctgggtgggcagccccagccccacctcgaggaaggccttcctgaacagctgggctgcagggtgtggatttgcatagaggcctggggggtcaagtcccccccaagagtgagctggagcaggagaagggtgggctggttgggaaacaggcctccctcatctctcctggcaccggagcatggtgggggtccctgggtgcagtcctgggacaaggggctttggcatccctccctggggagggtcaggcacggggctccaggctaacaaaggccctggagatactaagcaggctttaactgagaggctccacgtaccactgacccaggtccccaccaggacctaagaccgggcttcccctgtccccttcagcccctctccccaggcctggccaccctaccctatccccaaagccggcccggcgtccccacccccgagttaaagcttgtgacctgagccttcctcttcgggccggggggcttccagctcctcagccagggcctcgtccaccggcccactcctctgaacccggctgctgccactgctgggggtcccatctggccgggcctgcccgcccgccccgttggacccaggctcagcccgggtgccaccaaaggggaagagcttgccagcatggaaggctttgggcggtgagtggctgcgctcagagtcccgccgggtctcgggtgacttgaggaacttgaagctgaggaaggcaggcaggcgggtgtcgctgcctgtgggtgactgggcagggggaggccgggtggtggctccggcccctgcagcagccagtgaggatgtggcccctgacgagaggaatttgccctgcagtgggatgatctgcttcaacttcatgacgttgttgggtgccagcagggaccctgggcgcttgggccgttcaggcccgtggccacccgcagtgctgcccttggccttggcagaggccttctcggaggaggtggcagggtccagcccagagccctcggccctcgcctcctctcggccaccagaatcatgctcccgccgggcatggtgctctgcatggcgctgtcgctcctcctcctcccgccgcctgcgctgctgctgctggtagcgatgctgggcctggcgctcgtgtctctgcaggtagagccaagccgttacaggactaagaagaaagggtgttagcgggtgccagctgaggctggtgcatgccagggctctctgcaaaagtgggggagacttaaatgcttattaggctccaactgtatccctgcacccacaatgggggctccctgcagaagtgggagagagccaatcacttattgggtgcaaacggcattcccagatacatgatcagcctctctgtggaaatgagggaggcttaaatgcttattggggctgggcgcagtggcttgcgcctgtaatcccagcactttgggaggctgagatgggaggatcacttgaggccaggagttcgagaccagcctggacaaaatggcaaaaccctgtctctaccaaaaatataaaaattagctgagcatggtggcacacgcctgtaattccagctactcggaaggctgaggcaggagaatcgcttgaacccgggagacggaggttgcagtgagctgagattgtgccattgcactccagcctggggacaaagcgagactgtctcaaaaaagagaaaaagaaaaaaagcgtattgggcgccagcttcatctctgggcccacactgaggttctctggggaactggagagagattccgaggcttattgggtgcaactgaatgaatccctggacccacgccggtactttctgggaattgaaaagaaaacaaacattcactggccatcaactctgtccccggctgtgtgccagacagcgtcttaggaattggtaaagtggaaaccaatcctgagcctcaaccgatcccctgcttcccagagaacaggcaagagacagaaccgtggctgcaggctgggtacggtggctcacgcctataatcccagcactttgggaggtgggcagattgcttgaggttaggagttggagaccagcctggccaacatggtgaaaccccatctctattaaaaatagaaaaattagccaggcgtggtgggacatgcctgtaatcccagctatttgggaggcatgagaattgcttaaacctgggaggtggagattgcggtgagccgagattgtgccactgcactccatgcactccagcctggatgacagagtgagagagattctgtctcaaagaaaaaacaaaaacaaaaacaaaaaggactatggctgcagcagactatacccaggtagccacgcgaggctctgttcaataaaataaaaattcagtttctcggtcgcagcagctgcacttcaacgtgctcacttatcacctgtagctaaaggctgcagggacagtgcagacaaaggacattgtcatcctcgaggaatgttccctgtgcaggcactggggagctccttggcccattctgtagctttctgaggaatgcggaagaagctgcgcttctaggaagcctccgctgtgtccctggccccctaacaggatgcaatcgggcaagctggtggatggctgaaggttctgaagggccagcctcgtgctggatgctgccaggattccagaagcgactggacccgttgtgaacactagttattattgcttattattactctttttagagacagggtcttgctccatcacccaggctggagtgcagtggcgcaatcatagctagctgcagcctcaaactcctgggctcaagcgatcctcccactttggcctcccaaagcgctgggatcataggagtgagccactgcacccagccagggagcactaattattatacccagctctgtgcagtctctgcatttgcccttacgctaaggaattggccaccaagatcagagatccaccagcagccccaccaatgagaaaaccgagcccagcctggcccccctaccttaaaggcctcgcggcgctggtactccagcttggccatttcctcggccacccagcccgggatatcggggatggccacgtggatgaggtacttgaggagcagagcgaagtgctgcaggggtggcagagaggaggctgcaggctgcagacgctggggccgccctctcgcctcccagctgcccccgcccctgtcgccggccccacctcgagcactaccaccgacacgatggctgcctccgggctcagccaggggaagaggcgctgcagctgcccgcactggccgattaagtagcagttgaccacaatcgctaggacacccatggcctccatcaccttctgcagggcggcaggagggctcaggcggggtccagccggcctccccagaccccaggctcctcccagctgcacctgggctccctctgggcctcagctcggatctcttggcttccccccacctgccactggccgatgctttccacgcgctggccgaagggccgctgcagcccggtgcacagcttgaaggcgtcgctgcggatctcaatgaggttgttgaccagggcgcacagcgccgccagggggaaggcggacgagaagagcacaacgtagccgaactgcacgaacatctcctggtagtcctggaacgtgtcctgcgagtgggcgggcctcagacctggaagcctcttccctgggacaatctttctcccattgagcccgcctccctcagattatcccatgtggacccagggcctgtccccatcctcagccagcccagaggcttcctgtatctggctaggccttcctctcctgcagcatcccaacatcaatggccctgttatcaccactcccacccccacggccttcaccctcggacggtgtgtcccgtccccggcgaggccccgccccctgcgaggccccgccccctcctcacctcgtacttcttcatacagctctccagctctgcctgggtgagctggggcgagtgttcctcctccggcgggtcaatccaagacgaccggttctgccgtctctgcctacgggtcgaatcgctgttggagccgggttccgggtccgggcccccgtcgggcccctggtctcggccctcgcccccggcccggcggaacaagatggccgggggctcccgttcagggctgccgggagccccctccgcctcgtcgtcctcctcggccagggtgaacactcccggctccagccccttctccaccatagtggggctcccttcctccaggagggcctccgggcttgggccgggccgacgccgccccgcgccgcgctcagcgaagctgaccttcttcagccggagcccgcagtccaggaggcccccttcctcgccctcctcctcgtcctcctcttcctcctcgtcctcctcctcctcgtcgtcctcgtcctcctccttgccccctggaggcccgtccccctcctccccgccttcccccgcccgccgccgctccaccagcgccgcctcctcctcctcctccggcgccccgcagcccccgctgaggcacctgcggcccccgcccccgctgccgccgcccccgccctcatccgcctggggttcgaggcggcggggcgcagggcgccggaggctcaggaggccaagcagggctcgggccagctcccagacggcccgcaggcccagctcgccgcggcccaggcgccggtacaggtgcggctgcaggacctcgcgcacgttctggaggaactggcgggtgatcagcagcgtggccagcatctgggggcaggaaggggaaggagagaggcgcgtggggggcaagcggggcgccgggatcgggggactcaccctccctgggcgccccgccggagcaccgtgcccagacacacgccgaatccggttcctaactccgctgctttggacgcgcctcgacgcgaggcccccagcgctcagccacaaaatacagcctggcacgcgcagcgctcctcgcccacctcacgggcaggcccagcgcgtctccaccccaccgcgggctctgtcggtgcactgggccgcgtgcgcccccagccgcctgcacctgcttgctggccgcccccgaccccagattccctccgcgcatgcgccctcagctcggcgcgccaggcccccagcacagccacgctgcccaccccggcgaggacccacgggctcgccacctgcccgtactttggcccgggccgcgagcaggaggccccggagggagaggaggagcaggcggaaccgcagggccgcgagcgggaccagcaccgcctgcagctgccgctcgaggctctgggacagggacaggacgagcaggagctgtgaagggaccgacggacagatggacggacagatggggggacgacaggcagagagaggacgcacagacgacggacaacggacggacagacaggagagaaggatggaggaggggagggaggggctggagagcccttggaccccttgtgccgggtctggcccctcgctggccgccatgggggcaggggggactgccgctggggcgggggtctcacctctttcaagcgctccatgtccttgaggtagaaaccgatgtagaagaggctcaggtacgagttgacaaactggaactgcaggaaggaggcaggcggtggtcatcctgcacccccacccgactccttggagccttccttgtgccccatacagacggcacagcttccccgttgtccccctgcctgtccgatggtggtgactcaccaggacaactttgatgatgaggtgcttctcataggcgctctccagccggtaattttctaggggccaagggggggagtgagggggcagccgcggtccccccaagggtggcagggatcccaaggggcagtggagaccttcctcccagagaccccctggcaggtcgtacccatgtcattgagccagatggctagcttcttgtagccctcggcactcacactgacaagcagggccagcatgaccttaggcaggaatcgggcgagacggggcaaccccttcacgctcagcaccagctcctgcgggagaagggggttcagggctcatcccagctgcagggctcagcccaaggtggagctaggtaccaaggacagggcgggtgagggtatggggggtcacctgcagctggaagcagccaagcatgagcaagaagacacagacgaggcacgccaggcacagggggaggctcacaagcagctggaagagcagccgcttccagggcgggtagtagaactcctcggcccgcgtgatggggctgatacgtcgcacgccctgatggtgggcaaagaccgggcccagcatgagctcagaggggccacctctgccttctgcacccctccctatcctcagaactcaatttccctccatcatgcggaggtgaccctctcaggtcacccacctagggcactgttcccagtccctcaaatccaacttccacctctccccctggggagcacacagagcccgcctcggtttggcataccctctttgatgaaacaatcctgtttcacacctctctgcctttgctcctgcagtgccccccaccatttacctttgtcctgtctccatgaccctggactcagcccccaactgaccctgaactgggggcgtggctcctccacggcttccccaggtgagtccagcgtcccccacttatatgccagctcagcccctctccgcttccattcctctaggaacagcgtcgaccagatcacgttgaagagggcaaagaccacgcaggaaacatcccggcttgtctgtgagtggcagagaagagttgagtcattgtttgtgccagtccagaaaggagggcgcctctggatcccccagaccttgcagggtccctgcccagtacctgatcagcctctgtgaatgtgtacaggacagacccgaagacagctgggtataccatagccgacgtgtagaagcccagccaggcgaagtacatggcaattttcacaccaaagtaatcacagatgtcatctgccaggggacaagtgggtctcagtcaccccctgcctgtctgctgggactccctcccaccccccagcccaggcagcacctagaggctggttttcacacacggcctgcacccatgacttcatgaggcggttcagaatacgctgctcgtggacagggaacacctgctggatgatcccacgtgctgccagctccgggactgtggagggaggagcacaggtgatccccgcccctccacctgtgcctagcctggctagcccctctttgtctgaaacccaagtcacagctttttgcctgctcttaaacctctagagctctttccaggggagaagttctagacggatagaagatctgattctccttcagaaattgtaggtgcaggggcaggcggggagaatgtaaaggaactgggagagtggggttctggtgaggaaccatgtttttttttttttttgagacagtctcactctgtcgcccaggctggagtgcagtggcgtgatctccgctcaccgcaaccttcaagcgattatcgtgcctcagcctccggagtagctgggattataggcgcccaccaccacgcccagctaatttttgtattttagtagagacggggtttcgccatgttggccaggctggtctcaaactcctgacctcaagtgatccacctgcctcggcctctcaaagtgctgagattacaggtgtgagccaccgcgcccggctttttttttttttttttttttttagacggggtctagctgtgtcaccaggctggagtgcagtagtgcgatctcagctcactgcaacctctgcctcccgggttcaagcgattctcctgcctcagcctcccgagtagctgggactacaggcgcgcgccaaccacacttggctaatttttgtatttttagtagagatgggggtttcaccatgttggccaggatggtctcgatctcctgacctcgtgatacgcccgcctcagcctcccaaagtgctgagattacaggcgtcagccaccgcgcccggccttattttttactttatttatttatttgtttgagacagggtctcgctctgtcacccaggctggacagaatgcagtggcgctaccatggctcactgcaacctcgaactcctgggctcaagtgatgctaccgcctggacctcccaaagtactgggagccactgcgcctgttcccctgctttaaataaagctcagtttgtggacccgaacgtctgaggaatggtaaaaacttgctgtcggaaggtgaacttgggtgcctagtttcctggaggggaatccaacgcccagagccgcaccactctgtaagtggagtgctgtccatggttcctgcctccactttatcccaaacccagaaaagggcctctcctggacccacctcccagaaataagccccaccctttggccaaagcctcgccccctcagctcattggttcccaaccctttgccaacccctaactggttggacataagccctgacctcctgtcctgataagctgtcctctcagagctccacccaactcaggagataagctccacccttttgctaaggccacacccctttagctcattggtttcctaactctttgccaacccctgactggttggatctgggccccgccctcctgctcctataagctgtctttgaagagctccacccaactctctgcctgtgattggtgttgaccccgccctgctcactgattggctggtcctccaggaagcgcacgttgtggagtgcttctccctgcttggcacgcaaattctgcagccagaagcggatgatgctctggcgttcctgcgaggaagagggcgtgagctcagggaactcataggcacaggatgcatgcgggggcccagagccggcctcacctgggaggtgaagaagcgtagctcgctctccacattctcatagataaagtcctcctcgcaggagaagccgcgggtgcccccgccaaactcggccttcactgctttgcgcagacccagctcgtcggcccctcggagtaggctgtgaagaaggcggaggaggtgggctcacagggaggccccggcccaccatcctggagctgaggatggtgcacctggcagcctttgggacaaacgcagggcggctggatagcatggttggcacttggtagagcggggagtcgggtggcaggctcagcgagaggccagggacaggggactcgcctctcatacgtggcggtgacaaagaaggcgtaggcacgcgtgtggcggtggtggcggacttgcacgatgagctcgggaatgcccacgcggatgtggttcagcagccatagcagcgtgtggtcatcggtcgtgtctgccaaggggcacagggaccgatggctcctgccacgagggggcccaaggcctcctacgtattcccgttctgggaagccgagctcaggagagccgcatctgggcactgggcgggcgggcgggcgggcttgggtacctgggaaggtcatcagcacgtcgcagttctctgtaggcaccgtcttcatccacgccttgtgggacaccaggtagcgaccagcctgcaggagccgctttccgaaaagcttatctagggggcggcgtagcaggcccgggtcaggccactctgggatccggacccggcctccagtcttggctcctcctgcccccgccagggctcctcaccactccacctggcattcaaggccccgggagctctgggcttggcttattttcctccctccacgtccttgtaccagccaggccttcctccagaaatgcccttccccccagatcctcccttacaaatcttactcattcttgaggcccagctccgcctccaaaaccacaatcgatggggcgctcactagcagccctgagcgcttcaccacattatgacagcgccgtccttgcagcagccccagggactaggtgcggttcttacccccatttcacaggtgaggaaactgaggcccagagcgtttaagtcacgcgcccaaggtcacacagtcaagctgggatttgaacccaggaccgtatgattctgtattcttcgcggagaggctctctcaagcacatccctggcccgccgcgatcccgcagcccgggggtggcagggcgcagcccaagcctggggctctcggaggggcgtgtccgcgtctccgcgccgggaccccagcccgaagcaccgtcccagccccgcccgccgggccgcagccgcagtgccgggaggagccggcccctcgtccagacaccacgccaggttacgtttgaccctgatcctcctccccgtgtagttgacgcgggctccccaggcacctgcaaccctgtctggtccagccgccgcacacatacccagaactccggacgccggggctgcaggctcgccctccggcgggggcctcttgccacgctcgccctccagggacgtgcccccggcgccggaggcggcctcggccatggcgaggacaggtcaggtcaggggctacggacggcccgggcgacggggagccgcgggctcatggggccggtgcagccgcggagcgcgcgggaggaggagacaaaggccgcgcccgcccgcgccggcctcggtcctcgctcgcccgagcgctgcttctcgtccccgcccgagccgaacctcgattctccttcccggcccgatgcacgtcactctagggttctcagctgagttcgcccgcctagttctttggttcgcgtctccgcccgtgttgttttctgggtttccttctcgcccgcctacctcgctccctgctgctggtccccgcccgcactgatggtgcattctccaacttgtccccacccatgctttcttctggtccccgcctcggagcctcagtttccccatctgcaaactccggaccctggagacgctgtttggaatgtgagatgggcgtaagttgactaagggaggacgtgggaggggcgggccggttggggaagattcctggtgacaataacttcaaccaccccagtagggctgtgatacataattacagcaagccctgcttaggaactttgcacgcaccatttggctgcctagaacactcctcatgcactcttcgtccggttaacaccgactcccttcaggatgtaacctcggagaggatcccatagagttgtcaagtttagcaaataaaaatacagtccgtctagttaaatgtaaatttcagataaaagaataaatgttagctgggcggggcgcacctgtaatcccagctacttgggaggctgaggcaggagaatcgcttgtgctcaggaggtcaaggctgcagtgagctgagatcacacccactgcactgcatcctgggcgacagaacgagaccctgtctcaaatacatatatatacatacatacataaatgtttctatgtcctatgtctacatgggacatactagtactaaaaaattattcattgtttatttgaaattcacatttagctgggcgacctgggttttacctggcatttggccaacccctgactattctgagtagctcagtctgttagactgaaagcccagcgagggtaggaacgaggggccaggtctggttctcaatgcgagcacacagtaggcgcttgctgtacgcttgttacagatgtaacaactagcttgttacagatgtaataactagcttgttacagatgtaacaactagagaatggcagatgaaatataaatatgtcatcatttgttcctattttacaacttaaaatattaaagcctcggccgggcgcagtggctcacgcctgtaatcccagcattttgggaggccaaggcgggtagatcacctgaggcaaggagttcgagaccagcctgaccaacatggccaaaccctgtctctattaaaaatacaaaaaattagccaggcatggtggcgcacgcctgtagtcccagctacttgggagtctgaggcaggagaatcgcttgaacctgggaggcggaggttgcagtgagtctagatcgcgccactgaactccagcctgggcgacagagcgagaccccgtctcaaaaaaaaaaaaaaaaaaaaaaaaaagcttgggcaacgtagtgagatccccgtctccaccaaaaaaacgaaaacaaaacaaacaaacaaaaacaacaaacaaaaagaaacaccgaaaagttagactggcatggtggctcgcgcctgtggttccagctactcaggaggctgaggcgggcggatcccttgagcccaaaagttggaggttgcaagagccgtgatcgcgccactgcactccagcctgggcgacagagtgagaccctgtctcaaaaataaaataaaataaaataataaagtaaataaaaatattgagcagggcgaggtaagggggtattagaactctattctgtcagacagatttttcttaacacgcaagtgcgccgcccgcccgctctgatccagaaccagagaatccgccatgcgaaggcgctcccggagaccccgcccagccagtgcctggaattccaccatcagcgctttattccgagtttcagtgctgtcctgggttaacctgaaagcaatctccgaggctcccctttctggctttcggggagccagagactgaccggacacttggctctgcaggtgcagacctggaccagagagacagagagccaaggaagtccacagtggagagagggctgtgctgggggttccaggaagacttcctggaggaggggatcttggagctaggccttgaagacgagtttgtcaaatgaggaagggcatccgaagccgagggaacggcagaagggaacgctggggaggggagagaatctggagagttccggaaaaagcaagtaggactctttccagaagttcgggcaagattttccctggatcagggcgtgggttctccagtactcgtccctcccggtcaccgagatgctctgagtttccggtctgaacctgaacgtaaagaggtgtagtccctcctttcttgaacgggaaaactgaacgcacataggtccttgccacgcctaaggctgcggagtgagcagatggaaaatgcgggactcaaaacctcccctcgctgtaatttgcactgccctgtgccaaactctgtcctttcttccattccttattcctattgtcagcctcgctgcgctaggaccctaaaaatttggtctcatgttgcccggggaacaacatttcgctacacctacctccataccgcctcccgctcccgctctcccttgcaccagccaatggaagcgagtatcttcagacggtgggcaggacgtatcctaagatacccaatggtggtcgagaatagttgagcactttactagtcaagccgcggagtgggcggggccccctgcccagacttgaagccacacaggcaggtcgggcaggcgggtcgcaggttgtaaatccatgtggcgggggctttggaccctggcggcccaagcggcacgtgggcctcgcaggtggggctacaggggaaggggtgcgacagcttggggtgctgcttggaccccagacccactccctgggttttaggggcccaattccctgcggcagagcaatcattcgcgttcttccgtgcctcaatcgttcatgacccttgcggcagagcccatatctgggtctccttctggcctcacagtccctaatccggtcacccttcggccttcagaacatccaatttgtgcatcccccagccgcagaacccccccacctggagcatctcgcgatcatcgagccctcggtctacttgacactgaggctgagcctcccaggtgcgctgattcgcctcccctccggttccagattgtgcacgcgccggagcagcggcgcaccagcccccggctccggcgccaccatcttcgcgctaagctctggccaaggccgctgcggcatcgcagtgatccggaccagcggccccgccagcggccacgccctccgaattctcacagcaccccgagacctgccccttgctcgccacgccagcctgcgcctgctcagcgatccccgctccggggagcctctggaccgcgcactggtgctctggttcccaggtgagggtccccaggttccgagcctcctgtaggtcccatgactcagtttcccccttccaagggtttgcactggctgtgctgtcctcctgtcacctgtctgtcacattaggtccccagagtttcaccggtgaggactgcgtggagttccacgtgcatggaggcccggcagtggtgagcggcgtcctgcaggccttgggtgagttgcagcgttgggtgagatgcttggtcctcccaatgggcctgggtggggaccagggggtgtcagactgggaccttcctgcaggcagcgtgccagggcttcgaccggcggaggcaggcgagttcaccagacgggcgttcgccaatgggaagctgaacctgaccgaagtggaggggctggcggaccttatccacgcggaaacagaggcgcagcggcggcaggccctcaggcagctggacggagagctgggccacctctgccgtggctgggccgagaccctcaccaaagcaagtcccccatttgtccattctctccctcagagaccccatctgtgcaacccctgcatgagaccccctctcaatcccgcattcattccctgcgtgaaagcttccggcctatgagccgccattctggcccctgaagtcgggctggacaaattgggtgtgggaaggtgggtttctgggtgcacacaccacctctgctctccctgccccgccaggctctggcccacgtggaggcctatatcgatttcggcgaggatgacaacctggaggagggggtcctggagcaaggtgggtctacctggtggtgggggaggaagacacctcatatcagccctcaaaggctcccctcactgtctctctctgcctgccttctctcacccacagccgacatcgaagtacgggcactgcaggtggccctgggtgcacatctacgagatgccaggcgcgggcagaggctccgctcaggggtgcacgtagtggtcactggaccccccaatgcgggcaagagcagcctagtgaacctgctcagtgagtaggcggcgggaagggggcggggcctagtgccaggggcggggccaagagctgggttattgagttagttgttcaggtctaaagctccctccagacatggggtagaacctgggggaggagctcccttgtctccaccctctcctcttcttctgaccctcccccaggtcggaagcctgtgtccatcgtgtccccggagccagggaccacccgtgacgtgctggagaccccagtcgacctggccggatttcctgtgctgctgagcgacacggctgggttgcgggagggcgtggggcccgtggagcaggagggcgtgcggcgcgcccgggagaggtgggcggacagggtggtgatgggaggggaacgcggggccctttctctgccttttctccctgttgcgtttatttttcattcttcctgaatcagagaacctgctaagccctatcaagcatggatctcagggatttggttctttttttttttttttttttttactccgagaccgagtcttgctctgtcgcccaggctggagtgcagtggcggtatctcagctcactgcaagctctgtcttccgggttcaagcaagtctcctgcctcagcctcccaagtagctgggattacaggcgggagcgaccacgccgaactattttttttttttttttgtatttttagtagagatgaggtttcactatgttggccaggttggtctctaactcctgagcctcggcctcccaaagtgttgtgagcccaccgcacctggcctggtgttttgtttttgtttttgagacggagtttcgctcttgttgcccaggctggagtgtgcagtggtacaatctcggctcactgcaacctccgcctctcgggttcaagtgattcttctgcctgggcctcccgagtagctgggattagaggcgcccaccacaatgccaggctaattttttgtatttttagtagagatgggggtttcaccatgttggccaggctggtctcgaactcctgatctcaggtgacccgcctgcctcggcctcccaaagtgctgggattacaggcgttagccactgtgcccggccagtgatttagttctgattaagtcctgcccccggccctccggacatgtttctcatccctaagccctccgcccagccctcacgttctgccccgccctctcgtgctctgtcccgccctggcactccgctctgccccttgcggtctatcccatcccctgtgctctgtccaccccctacattctgccccacccctggtgctctctaccccttaccctgtggtgtgtctggtccttcttgctctgccccgccactcatggtcgccccactccagtgctgtacccggccccttttgctctgtcccagcccctgtgctgtgccctgtccctcttgctctgctcttccccctgcacagtgctctgcccctcttgctctgccccgccctcctgtgctgtgccccgcccctcctgccctgccctactcactgcactgtgcccagcccctcctgctctgccccgctcccgcaccgtgaccgctcctcttgctctgcccttccccctgcactgtgccccgcccctcttgctctgccccaccccctgtgctcggcttgggcccccaacattctgccggtcccctggtactctactcctccctcccgacctcacgcttcgcagctcccccagtgctctgcctggcccctctaactgtccctccacccagtgccttcaattgctcaacctgggatccccgctcagttgaccttgctcccgcaggctagagcaggctgacctcattctggccatgctggatgcttctgacctggcctctccctccagttgcaacttcctggccaccgtcgtagcctctgtgggagcccagagccccagtgacagcagccagcgcctcctcctggtgctgaacaagtcggacctgctgtccccggagggcccaggtcccggtcctgacctgcccccgcacctgctgctgtcctgtctgacgggagaggggctggacggcctcctggaggcgctgaggaaggagctagctgcagtgtgagccccctcccactcccagcctcccctgacccacagtttaagtgtgggtccctcaacttcaatttctgaacctacaaaatgggtacaaccatttccccttcaagggatggttgtaaaaggtcgggagagaccatgtctcttgtctcttccaggtgtggggacccgtccacagatcccccgctgctgacccgagcaaggcaccagcaccacctccagggttgcctggatgccctcggccactacaagcagtcaaaagacctggccctggcggcagaggcgctgcgggtggcccggggtcacctgacccggctcacaggtggagggggtaccgaggagatcctggacatcatcttccaggacttctgtgtgggcaagtgacgggatccagggaagtcgcacccaagctgcgtggagacccaggagcctcgggggatctggaaacagtttaggccaattgggattctcattcgcctgggaaagaacttgattctcaaatagtgaagcaacacagctgagaggtagtgagatccctgcagggactccctggagattcaggccctggaatggggctgaatggaggtcccgttcgacccttgatgctggggcatccgggttgggatggagataggaggatctcagtatatttgtttcgtagttttttatttattttgcaaataccaaaggaatgtaaaaaaaactcaggtgatctagaagtgtttattttcttcccttcccttcccttccctttccttttccctttccctttccccttccccttccccttccccttcccctacccttccctcctctgtctattgcccaggctggagtgcagtggtgcgaccttggctcactgcaacctccatctccggggctcaagcgcttctcctgcctcagcctcctgagtagctgggattacaggcatgtgccagcatgcccggctaatttttttctttttttgagacagagtctcgctctgtcacccaggctggagttcagtggtgcgacctcggcttactgcaacctccacctcccgggttcaagtgattctcctgcctcagcctcttgagtagctgggactacaggcgcacaccaccacgccaggctaatttttgtatttttagtagagacaaggtttcaccatgttgaccaggctggtcttgaactccttgacctcaggtaatctgcctaccttggcctcccaaagtgctgggatcacaggcgtgagctatcacacctggccccagaagtgtttcaacatggaaattttccttagcccttctgtggttgtcatggcttaatgtgtgtctttccagaactttgaatgtttgcatacttgtggatgtacctttcaaatatgtttgtcttgtgtatcatatataaatggtattgtgttcattgctctacaaattgtcatttctttttaaaaaaaaaacagaattatggagatggggggtctcactatgttgcccaggctggtcttgagctcttggactcaagccatcctgctgtcttggcctcccaaagtgctgggattacaggtgtgagccacggtgcctggcctcattccttttttagtctttagtcttctttttttttttttttttttttgatggggtttcactgtgttagccaggctggtcttgatctcctgaccttgtgatctgcccacctgtggcctcccaaagtgtgtgtgtgtgtgtgtgtgtgtgtgtgtgtgtgtgtgtgtgtgtgacagagtcttgctctgttgcccagactgaagtgcagtggtgtgatctcagctcactgcagcctctgcctcctgagctcaagccattctcgtgcctcagcctcccgagcagctgggatcataggtgtaccctaccacacctggctaacttttgtatttttagtagagatgggtatttgtcatgttgcccaggctggtctcaagctcctggcctcaaaagatctgcccgtcttgtcctcccaaagtgctggggttacaggcgtgagccaccacacccacctttttttttttttttttttttttagatggagtctcactctgttgcccggcctggagtgcagtggcgcaatctcggctcactgcaagctccgcctcccgggttcatgctattctcctgcctcagcctctgaatagctgggactacaggcgcccgccaccatgcctggctaattttttgtatttttagtagagacagggtttcaccgtgttagccaggatagtcttgagaccctgaccttgcactaccatatcccatgtctggctaatttcttattttttatagagatggggtctccctatattgcccaggctggccttgaactcgtggactcaagcgatcctcccaccccagcctcccaaactgctgagattacaggtgtgagccaccacaccaggacaacctcttgtatcttaaaaatgactggcaaggccgggcgcagtggctcatgctgataatcccagcactttgggaggccataggtgggcggatcacgaggtcaggagatcgagaccagcctggctaacacggtgaaaccccatctctactaaaaatacaaaaaattagctgggcatggtggcatgcgcctatagtcccagctatcgggaggctgagtcaggagaattgcttgaacccgggaagcagaggttgcagtgagccgagaccgtgccactgcactccagcctgggcgacagagggagagtccgactccgtctcaaaacaaataaacaaacaaacaaaaatctgactggcaaaacctaggggtctttctccctctataagctgaatctttattcattcattcattcactcactccgtgaatattcatcaaactcctgcatccagcattgtacacatcattttattgaatcttcaccacagcacgatgttgtggctattttcttccagttttgcagatgagaaaactgaggctcacaggaatagttacttcctggagtttccccagctttggggtttgaacacaggtctgtttgactccaaatctgagtttgctgagggcctcctgtgcagcaggcaggatgttggggtcacagaggggagcaacaggcttggtccctgttcacattaaagaagtgacaagaggccaggcgtggtggctcacgcctgtaatcccaacaattttggaagccaaggtgggcagatcacttgaggcctggagtttgagaccagcctggccaacgtggtgaaaccccatctctacaaaaaatacaaacattagccaagcatggtggcacacgtctgtggtcccagtaactcaggagggtgagacaagagagttgcttgaacctgggaggcagaggttgcagtgagcagagatcacgccactgcactccagcctgggcgatagagcgagactctgtctcgaaacaacaacgaaaagaagagacaagaaagaggtcattacagtgaggcctgatggctgctctttttttttttgagatagagtctttgctcttttgcccagggtggagtggcatgatctcagctcactggcaacctctgcctcccaggttcaagcgactctcctgcctcagcctcccgagtagctgggactataggcgtgtgccaccacgcctggctaatttttgtatttttagtagagacgggtttcaccatgttggccaggctggtctcaaatgcctgggattacaggcgtgagccaccgtgcccagccttttttttttttttctttaagtaaagatgggggtcttgctgtgttgcccaggctggtctcaaactcttggcctctggtgatcctgagacctcagcctcccaaagtgctgggatcacatgtgtgagccaccgtgcctggcctgatggcttctttgaagctcataaagaggagaagtgacctagtcaggcaacttaaagtgggctgcctggcagaggtgatgagtgttgagatctgaatggtgaggatgtcagatggaggagtctggggagggcaccccaggcagagggcactgaatatgcaaatcccttcatatgcatatcccactgacacatatttcactggattacatatcccactgattcaggaacttcgcggtgtgttcaaggaatagtgagatggtcaggtttttttgttggtttgtttgctttttttttttttttttttttgagacagggtcttgctctgtcgcccaggctggagtgcggtggcgtgattgtggctcactgcaacctccgccttccaggttcaagcaattctcctgcctcagcctcccaagtagctgggattacaggcatgtgccaccacgcccgaccttttttttttttttttttttttttgacaaggcctctccctttcacccaggctggactgcagtggctcgatcatggctcactgtagcttccatcttctgggctcaagtgatcctcccacctcagcctcctgaatagctaggactacaggcatgcgccaccacgcccagctaatttttaaatttcttttagagatgggttctcactatgttgcccaagctggttttaagcttttgggctcaggcaatcttcctgccttggcttcccaaggtgctgggattacaggtgtgagctactatgcctggccctttttttgggggggggttggggtggggtctcactctgtcacccaggctggaatgcagtggtacaatcatggctcactgtaatcttcaacctcctgggctcagttgatccttccacctcggcctcctgaatagctaggaccacaaccaccatgcccggctaatttttaaatttttttcatggagacaggatcttgctatgttgcccaggttggtctcaaactcctgacctcaagtgatctgtccgcctcagcctcccaaagtgttgggattacaggcgagagccaccgcgcccggccagaggtggtcagagtggctggagcagaggaaaggaggagaaagaggagggagaccattggagaagggatggatggaggggtctgataggcagaggttcgtctgagattcttcggggagcctgacgtggcggggaccgaccagcagagggcgcgtcgcgctaagtgaggcggtccccagcaatcctcccatcagcgctcccggtgccccaccctcagcggatctaggccttccgcattcacctggtggcatgtgaatggttaacttcccctgactggggtggaaactgagtctcgaagagaatcaggatcttttctggaatcagaaaaagatctccacctccagtggttgaatatacaaactctgatttcagtggacacagagcctgggaggcatccgcggcagagagagggcacgaaaagggcctaaggaggcccgcagagtttctgaccacccaactgaaggagacctcagggccgggcgcggtggctcacgcctgtaatcccagcactttgggaggccaaggtgggtggatcacctgaggtcaggagaccagcctggccaacgtagtgaaaccccgtctctactaaaaatacaaaaattagccgggcgtgctggtgcatatctgtaatcctagctattcgggaggctgaggcaggagaatcatttgaacctgggaggcggaggttgcagtgagccaagatggcgccactacactctagcctgggaaacagagtgagactccatctcacattaaaaaaaaaaaaaaaagaaaaagatctccacctccagtggttgaagatagaaactctctggtttcaggggacacagagcctgggagacatcccgggcagacagagggcatgacaagggccaaaggaggccaccagagtttcccaaccacccaactagaggagacccaggcctgattttatttacagggttcctggcagtatgtcactatttgttcatttccttgcttgttcaaccaaatcaacaaattggggctggaggggcggtggccagagtggaaagggtcacaccatgagctgagtccacagatgttactattggccccatcaggaaaccaaaccgatgcccagagaagaaaagcaataatgtagatctgggcgtgaggggtgggcttgaagtggggagggtcctgaaggctcccaggaggggtgagctgggcctgtgcctgggtgggattggagatgctctttggacaggatgctggggccccgcctgccttccctggggccctggcacacagctggcctgaggtccttggctacaatcctttttttccaagaagggtgaggtggtttgtgggaagcagccatgggggttatttatagaggctgcaggaaatccccaaagagtctgagactcgccaggcggttggacctcagggtcaggaagggggcctgatcggccaattgctcgacccccaccccctgtattcagcccccacccggttcctgaggagtcaccagcctgggacagtcagagctttagggtcagagctggaaagagggagggatgaggctgggagagaggtttccaaaaggggaagcaagggctatatctgggacttcaagaaaggctgcctggaggagggggtctctggagctgggcttcagaggtagaagggttcgttagacatgaaaaagactttctaatccaagggcacagcacaaattaatgaatgttgagtcttttacaaagaattaaaaagtccaggataggaggaggcaaaaggggagtcacagatgtgctaaggagttagactttgttctaagggtaatagggagccatggagagtgtgtgagcaggagagggacttggacagagtctgtaatggaaagactcctctggaccagcacaggagccataccagaggcagcagctgaggtgcaagtgtacaggggctgagccagggccaggtcactgggatcggttagagggatgatggctcctggaatgctctggaaggcaaaacagacaaaggaccagaggcctgtgcccatgtgtctggagagtttagaattattactattattattttagagacagggtcttgctctgtcgccccggctggagtacagtggtgcaatcctagctcactgcagcctccaactcctggactcaagtgattctcctgcctcagccccccaggtagctgggactaaaggtacgcaccaccatgcccagctaatttttaaatttttgctagacatagggtcttgctaaatttctcaggctggtctcaaactcctggactcaagcgatcctcctatctcgatcccccaaagcgctgagataatagccatgagccaccgtgcccagccctaatacaactttatttataaaaacaatgcctgaccttagagttattattattacacccaatgcttggatgagaaaatggaggctaggattgactgagccaagattcaaacccagggatgtttggctctgaaatcctaaatcaggtcttctgggatggttaggactggctggcatcaatgtctccccctaaggactctgggctgtctggcagtaggcttaggggcagggatgtccccgcttccttggggcctccagctcagcccgtctgggcggtctggccaggctgacccccctactctgtcttggcagagccccagctgagcgcttcctgcggtgaccatctctcgcccttgtttccgtatcccggaaatatcgttcctttgtccctccagactagcctgccctaagcgtggcgctgccagctcccaggtccttgtgactcatccgtcccagtccaggaccccaggggatgggctgggagggaattgagggattgagaggatgggaggtgttgggggaggagacaagctgagatcctagccagtgatttctttctttctttctttctttctttctttctttctttctctctctctctctctctctctctctctctctctctctctctctctctctctctctctctctctctctttctttctttctttcttttttttgagatgcagtctcgctctgtcgcccaggctggagtgcagtggcgcgatctcggctcactgcaacctctgcctcttgggttcaagcgattctcctgcttcagcctcctaagtagctgggactacaggcatgcaccatcacgcctggccaatttttttgtatttttagcagagatgggatttcaccacgttggtcagactggtctcgaactcctgatctcaaatgatctgcccgcctcagcctcccgaagtgctgggattacaggcatgagcaaccatgcccggccctagacagcgattttaaggctgtttttcctgatggccattggctttatgtcctgaagtttttacttgttagagataaagccccagggatggggttacagagtcaaagttttgtgcattcattcatttgagacagggtcttgctctgtcacccaagttgatgcatagtggtggaatcagagcccactgcagccttcagctcctgagctcaagcaattctcccacctcagcctcccaagtagctggcactacaagaacgcaccatcacacctggttttctttaaattttttgtagagacgaggtctcgctatgttgcccaggctgacctcgaattctggcgctcaagcgatcctcctacctagggctctcaaagtgctgagattacaggaatgtgccattgcacccagcctgattttattacgtttcactaaactagtttctggaagggctattacaggacttgaatttctaccagtcttgtaggaaaaggaccttttttctacacctttacttgcagtaggtgttgggtgttatgaccttgaaaagacattttcccagtctgctgggtgcaatgtgatttccctgtgttctttcgatttgcttttccctgactactggctaatttagtgatagcagtgagccaaagtgtctttaaactggacactggtaccttttctggagaattctttgcaaacctagaactttctttctcttttttctttctttttttttttttttttttgagacagggtcttgctttgttgcccaggctggagtgcggtggcgtgatctcggctcactgcaacctccgcctcctagggttcaagaggtcctcgtgcctcagcctcccgagtagctgggattacagacgcacaccactacgcctggctttgtgtttttttgtagagatggggttttgccatgttggccaagttggtcttaaactcctggcctcaggtgatccactcacctcagcctcccaaagtgctgggattatagggactacaggcgtgtgccaccatgcctggctaatttttaaaatcttttgtaaagacaagttctcactatattgccacaactggtcttgaaatcctgggctcaagcaattctctcacctctgcctccagattagctgggtccacaggtgcacatcaccatgcttggataatttttaaggtttttgtagagacagtgtcttgctatgttgcccaggctgttcttgaactcctgagctcaagcgatcctccagcctcagcctcccaaaatgctgggattacagatgtgagacatctttcttggcctgctgtttaaaggaaacactaaatttaacagcattgccgtcatgatgctgtgccttgtagccactgcattaaaccctctttggctatgactctgctatttccctttgtgtatagagatgcctgtgccttgggggctgctggtgtcccccaacgtttgttccaggttgaagggtcttgtggcctggaggagttggggaggaggttccctggctttcatcttctttccagtcttttctccttcatagccatgtggtacttttgttgttgttgttgttgttgtgttgtgttttgttttgttttttgctctgttgcccaggctagggtgcagtggctcgatcttggctcactgcagcctccacctcccgggttcaagagattctcctccttcagcctcccgagtagctgggattacaggcgtgcatcaccacgcccagctaatttttgtattttaagtagagatgtggtttcaccatgttggctaggctggtctcgaactcctgacctcaagtgatcctcccgccttggcctcccaaagtgttgggattacaggcgtgagccagcatgcccagaaaccatgtggtacctttaaaagcagaaatcacgcttctggagtctttgaaggatttactaatatttattaagtgccaccaacatttcaacgggccacaggcagggctgggagttgggggagaaggagtggctcccctcccgacaacaggtgaccctcacccccggctcagggccccgagggggtcctggaaacactcacgctcaaggagcggaggtgaatggcttcctgttctcacctccgggtccaggcactgggggtgaggaagtggctgggaggccaggaggctggaggaggggaggtgctggggcccagggctgtgcgggaggggatgggatcctgtgggtaccttggcccgtgtgccagggtcgggggaacgtgacactaggtgagaattgggtagaaagtgtgtgtgaaagggcatgcgtgcatgtgatgttggtgccatatctataggtgtcgttgtcatggtgtgtgttgtcactgtgtctgtgtgtgacatcatcaccgtctgtgtgatgccatcgccgcgtctgtgtgacattaatatgtgtgacgtcgacatggcccgtgacgtcgttgctgcatctcggtgtgacgtcatgccaagttccccatgtctgtgtgcgacgtgctgcatctgcacgacgccatcgctatatctcttcgtgacgtctacatggccacgtgacgccatcaccacggtgatatgtgacgtcagcgccgttgcttgcgtgacgtcatctccgcggccgtgtgctctgggtgagggatcgtgaggcgcgggtgcgggtgtgagagggtactaggggtttgcatgcagggagttgtctgatggtggccctgggtggttgggggcggcgggagggggttgtgtcgggcgctgtgagcatatccctgcatcctccgcaaaccgccgagtcgggccatcccttggtcctcaggcctggagcctcctcagccactagggcaggaaggggatggtaacacaacagagtgtcagacagagggaagggcaaacctcgccgggccctggaggctcgtcctcagcggggacacaacatcctggggaccccggccctgcctcctaccaccctgggcccctacttcttcctcagaaccccagggctccttcgggttcagcctctccatgagacgctcatgtgttgaacctccccaggatggtgaatggtgagactgaggtgtgttcttccccattatacagatgaagagactgagattcagagtggccacacttcacgagccccaagcctctgctacagcttgtttgactctccccagtgcctcccaacattctggggatactgagaatttaccccaaagcctctgctcccccagacccctacactggttcccaaggcaaggcttcggtctccctcttttgcctgctcctgctcacatgtcctccatggctccccagtgccctcaggagaaagtccaaaccttacaacgtggcattcagggctccacccctctgcccctgccaggcctccccatcagggactcctgctgtgccaaagacccaacaattccaagagccatcacactgcttccgcaccctccggccccaccgcctttgcacgatcggagttgtcttgctatctgggatgccctccccctcctgggcctggcagaggttcctgcgaggggtcaggggttggcttagagcctgtttcctgctgggggaggagggggctgtggctaagtcccgcttccgctggtcctctcccttccttccccggctcttccctggggcccgagtggcctcacgttccttggttggctctgggccctggccctggccccagactccatcctcaaccagcatttacccagctcttgtccctgctgccagcctgcaaggctccatctttgcttgaactgggtcaatgcacatccctctgtcctggtccccagctctttgtcccgtagtctgttccccaacagtgaccagaggaacttgtggatgcttgaactgggtcatgcacatcccccgtctgctcaggtcctcacagcagccacaggcagggcttgatcagctcccatcacttccctgccctcacctcctcctcccgttcccctccatcactccactccagccacaccggcctcttccctcaaacacacaaggcacggtcccaccttggggcctttgccctggctgtgtcctctgtctggtgcacccttcctgggatccccccatggctcctccctcacctcctctgggtctctgcttcaatatcacctcctcggtgtagcctgccctgtctctggtagaaagttccaaccttcttacgcttcctgcccctttctctgtctcgcccatcaccaaaggacccttgagtgacccgttcatctaatttattatccatctctcccactagactgtgagccccatgagggcagcgggtttctgtgccttgttcccagcacccagcaccatgcccggttaccagcagctgctcaataaatacggctcgaatggacacacgaatcatcagaggcgttaacagtgaacttgaacaacattaaccacgtgtccagctcagagccagggctggactcccatcttaagcccatacggccgggcgcggtggctcatgcctgtaatcccagcactttgggaggccgaggtggagggatcatttgaggctaggagttcaaaaccagcctggccaatgtggtgaaaactcatttctactataaatacaaaagttagccgggcctggtgatgcatgtctgtaatcccagctacttgggaggctgaggcatgagaattgcttgaacccaggaggtgggagttgcagtgagccaagatcacaccactgcactgcagcctgggcaacacagcaagactctctcaaaaaataaaaaagattaagaaaataatgccaggcgcagtggctcatacctgtaatcctagcactttgggagacggaggtgggcggatcacctgaggtcaggagtttaagaccagcctggccaacatggcgaaacgccgtctctactaaaaatacaaaaattagccgggtgtggtggtgcatgcctttaatcccagctactcgggaggctgaagtaggagaatcacttgaacctgggaggcagaggttacagtgagccgagatggcaccattgcactccagcctggaaaacagagcgagactctgtctcaaaaaaaaaaaaaaaaaaagggccgggcgctgtgactcacacctgtaatcccagcactttgggaggccgaggcaggcggatcacgagatgaggagatcgagaccatcctggctaacacagtgaaaccccgcctctactaaaaatacaaaaaattaaccgggcgtggtggtggccacctgtagtcccagctactcaggaggctgaggcaggagaatggcgtgaacccgggaggcagagcttgcagtgagccgagatcgtgccactgcactccagcctgggtgacagagcaagactccgtctcaaaaaaaaaaaaaaattaaaattaaaaataaaaataaaatcttggccaggtgtggtggcccagcctgtaatcctcgcactttaggaggctgaggcgggcagatcacctgagatcaggagttcaagaccagcctagtaaacatggtgaaacgccatctctactaaaaatacaaaaaaaatcacccaggctggtggcgggcacctgtaatcccagctactcgggaggctgaggcaggagaattgcttgaacctgggaggtggaggttgcagtgagctgagatcacaccagtgtactccagcgtgggtggcagagtgagactccatctcaaaataataataataataataataataataataataataaaataaataataaaatcttttttaaaaaaagctcttcccattgcaatttttgccatattcagccacatagctcctggaccaagatttacttaatatttgccatttaaaaaacgttttagaggcagggtcttcctctgtcacccaggttggagtgcagtggcgtgatcatagctcactgcagccttgaactcctcggctcaagcagtcctcctgcctcagcctcccaagtagctgggactacaggtgcatgccatcatgcctggttaatttttttttttttttttgagacagtgtctcgctctgtagcccaggctggagtgcagtggtgcaatctcagctcactgcaacctccacctcccaggtcctggttcaagcaattctcctgccttagcctcccgagtagctgggattacaggcacactccaccatgtccagttaattttttgtatttttagtagagacagggtatcaccatgttggccatgctggtcttgaactcttaacctcatgatctgcccgcctcagcctcccaaagttctgggattacaggtgtgagccaacatacccagccattactgtctttatatcgtttttaaagaaacttacattgatttccaaagacactcagtctctacttctttttttgtttgtttttgtttttgctctgcctcatgtgatctgcaggaagggacactcagtctcatcaagtaaaggaaagctggcgcacacatcaccaacagaaaatgactttaaaattttccataggccgggcaccatggctcatgcctgtaatcccagaactttgggaggccaaggcgggcggactgcctgaggtcaggagttcgagaccagcctggctaatgtggtgaaaccctgtctctactaaaaaatacaaaaaataaccgggcatgctggcacgtgcctgtaatcccagctactcgggaggctgaggcatgagaatcgcttgaacccgggagacagaggtttcagtgagcagagattgcgccactgcactccagcccagcgacagagtgagactccatctaaaaagaaaaagaaagattttttttccataagagcaagacctcacgccgaagcccagctgatgtggggccctgcgtcggccatcgatttgggaacacgggagatgcgcaagtgtctggaagccgttagagcaagttaataccagctaaggctttgtctattttatttttttaaactaaacactatattaatgagaattttattttttctctcttagagacgaggacttgctatgttgcccaggctggacttgaactcctagactcaagcaattcatcctcctcagcctcccaaagtgctgggattacaggcgtgagccactttgtcccactaaactgagattttatcaaggcttagaaggaataagagtgggtcgggtgtgatggctcacgcctgtaatcccagcactgtgggaggctgaggtgggtggatcacctgaggtcgggagttcgagaccagcctgaccaacatggtgaaaccccgtctctactaaaaaaacaaaattagccgggcgtgatggcgcatgcctgtaatcccagctgcttgggaggctgaggcaggagaatcacttgaacccaggaggtggaggttgcggtgagctgagatcgggccattgcactccagcctgggcaacgagagagaaactccgtctcaaaaacaaaaaaacaaaagaagaagaagtaagagtggaggccggagggggtggcttatacctctaatcccagcactttgggaggccaaggagggcggatcacttgaggccaggagtttgagaccagcatggccaacatggtgaaaccccaaaatttttacaaattttgtagaaaaagatacaaaaattagccaggtgtggtggtacactcctgtaatcccagctactcaggaggctgaggcaggacaattgcttaacccaggagacggaggttgcagtgagctgtgattgcgccactgcactcctgcctaggagacagagtgagagtccatctcaaaaaaaagaaaaaggagtggaaaaggaaaaatcaactctcccgatgcatgaggtgggtgatttaatgctgagtcttgtcccagcacctcattaggtgcatctaaaattctagtgactcagctacttgggaggccgaggcaggaagatcacttgaggccaggagttcaaatccagcctgggcaacatagcaagacccctgtctctacaaaaaaataacaatttagctaggcatggtggagtgtacctgtaggctcaaccactggggaggctgaggcaggaagattgtttgagcccaggagttcgaggctgcagtgagctatgatcgtgccactgcactccagcctgggtgacagagcaagaccctgtctcgaaaaaaataatgattaaaaaaataaaattccagtgactctccccaagttgcccagttaacccagagcagacagccccagcccacttgcccccggcctctctcaggggaaggcgagtcaagggcagaagccagcaggccagaagcccttcctgcgaccgtgaggagagaagcaggcaaggtccaggcttaagtacacattgttttctcggcaggtggacgtcatttcggggtaaacaatgtcaagagcttccctggttctcagccgaggccctgacagtcctgggctgggagcccgggcctggccctgattctccactgtgtgaccccaggctgctcacttccctggggcctcagtttcctcctctgagaagtggggataataatagaacctccttccttgccatgagggctttcggccaagatggagagaggaaaattgtgtttgcttggagcggggaatctcctcctcacctttttgtttccctccctgtgggctgctcagggctgagaactttctcccagacagagccatctagagcaaaggggttgagagacagcttggcgagggagtgagctccctgttggagagggtatgcaagaaggaaaaaaaaaaaaaagaagaagaggtggaaatggagctggacatgatgcatcctggggagttggcggcaaagctttcggaaatctacttggccagaaatcccatattagccctctgaggctgcaacagacccagaatgacaatagctccgtggcaaaatggtcataggcacagtggttggggtcaaagggatctgacttaaagttctggtgccttcctgagcctcgggtcctaaactgcaaacagcaatgccaggccctgactcctccgtcagtggtgtagcaggaccccagagagagcacaggctattcttggggcggtggcctgagtcaccatccctgtgacgcacaggccaccctctgagaagtgactgactctgggaggaggcagggggcacaggcagcaagccatgacctgagcgtgtgccaggagcccttgctgcttcctacagaggcccctagtcccttgctccggtcatttttggatggcaccttgcaattagcaaagcatttccaggcccttgacttcagagactatcttttttttttttccaagacaggatctcactctgtctcccaggctggagtgcagggatgcgatcttggctctctgcagcctccacctcctggactcgggcgatcttcccacctcaggctcctgagtagctcggactacaggtgcgcaccaccacacctgggtaatttttgtattttttgtacagagggggttttgctatgttgcccagactggtcttgaactcctgggctcaagcaatcctctcacctcggcctcccaaagtgctgggattacaggtgtgagccacagtgcctagctgagactcttttttatttattatttttatttttattttttgttgcccaggctggagtgtagtggctcaatcttggctcactgcaacctccacctcccgggttcaagtgattctcctgcctcagcctccggagtagctgggattacaggtgcccaccaccacacccggctaatttttgtattttttttttttttttagtagagacagggtttcaccatgttggccaagctagttttgaactcctgagctcaagtgatccgcccgcttcagcctcccaaagtgctgggattacaggcgtgagccactgcaaccagcctctctttttttgagacagagtcttgctctgttcccaggctggagtgcaatggtgtcatctcggctcactgcaacctctgcctcccgggttcaagtgattctcctgcctcagtctcccaagcagctgggactacaggcgcataccaccacgcccagctactttttgtatttttagtagagatggggtttcaccatgttggccagatggtcttgatctcttgacctcatgatccgcccacctcggcctgggattacaggcgtaagccaccgtacccggcctctttttttttttttttttctgacacagtctcactctgtcgtccaggctggagtgcagtggcatgatctcggctcactgcaacctccgcctcccaggttcaagcaattctcctgcctcagcctcctgagtagctgggattccaagcatgagccactgtgcccagctgagactcattttctagaaagtaaaggtcaggattcattcctggatgccactcccccttctctccctctgctcattaccttccctcacccccgtccagcctccaggcctttggcctggctgttcctgctgcctagaacactgttccccctgctttccctgaggccagctcctcatgctccagctcttcctcaccaaggctctctcttgcctgtttggggtccgatggcctgggttcatgtcccagctctgctgtgctccctggggtacagggcatgccctctctgtgcctcactctcctcatctggaaagtgggtagaatagtggtttgccctactattattgttaagttgtgaagattacatgaattaatcttgcaaagtacttagaactgcgtggggctcccagtaggtgcctaataattgtaggctctttggtagtcccatcatgacactgtctaacccactactcagggagtttcatgaggacaggactgggtgtgtcttggatactgctgtgtccctcacgcccaaccatacatgacctagtatacagcaggtgctcaattaaggaagaagcaagtgtgagatcagcctccctccaccctcagtcctggtcctagctttgcccacagttctaagactgaacaactgcagtctgcccagtgccttacctggatggggctacagggatgcctgcagggggcctctgggactccaggatcttcctcttgaactcctccaggctagctgggtctgtggagggagagaggtgaggcttgacctacagcttcagttgcccctgcccctgggctagggatgggctggcagcccaggggagtgggaaagtggggctggggtggggttcgaggtggaaaggggcccctcccctacttggctctgtcttttgtcactcaccgatgggctgggggttggggacagggcccatgggccttgacactggcatcatcggctgcgactgtgaaagaaagatggagggaggttggtaggagccagggcttcccagacaggcttctgccttttcttttcttttctttttctttttttttttttttttgagacggagtttcgctcttgttgcccaggctggagtgcagtggtgtgatcttggctcattgcaaactctgcctcccaggttcaagcgattctcctgcctaagcctcctgggtagctgggactacagtcacacaccaccatgcctggctaattttttgtatttttaatagagctggggtttcactatgttggccaggctggtctcgaactcctgacctcaggtgatctgcctgcctcggcctcccaaagtgctgggattacaggcatgaaccactgcacccggccaggttctgtgctttcatgcccttcaagaccatcgtctctaaagtccttccagggcagggtaacagaccccatgtagaaagacatacatggtcatgaacatagaatcacctgcacgcaccacaagacttggggacaccacaagatggcttggggacttgtgggactgatcacctcggcagtcctgaggccccatgctgcagagctggcctacccctgtctccatcacagcctcagggtgaatccagttccaacccaagaccccatcggagtctactcacccaccacagcccccttcagactgaagccaacctaccgtgtagactaactggaccccgatcctaaatgccacccctggaatatccctgagccaatcccccaaaacctgaaatccaaagccaattctgaactcaatcacctaaaatctgatcccaacgtgaaaagtcaatctcccttagaatcaagcctcagcctaaacccagtcctaattataaactggatctgaccatatcttcagatctcactctgactccaaccattctcttgacccaacctctatgaaaatacccgtttcgggccaggcgtggtggctcacgcccgtaatcccaacactttgggaagccgaggtgggcagatcccctgaggtcaggagttcgagaccagcctggccaacatggtgaaaccccatctctactaaaaataaaaaaaaataaaaaaaaaaaaatcagccgggcctggtggcgggcacctgtagtcgcagctactcggggaagctgaggcaggagaattgcttgaacctgggaggcggaggtagcagtgagccaagattgtaccactgcactccagcctgggtgacagagcgaaactctgtctcaaaaagaaaaaagagaaaatatccatttccccagccccagccctgtgctccaacatgtcctcctacaaacacttgtgcaatgtcatgctcaacctcctcaaccccagaccccagcctctgcccagctcccatcctaaacccaccctcagttccaatcccaacccaaacttcactccaatcctaaggccctatggagcccctgatgttaacccgaaacagtcctaagctggtcagttaccccaaatccacctcaacccacttccaccccgagattggcatctaccccaaattttcctctcaacccagccctgatcgtcactcaaccccaatgtccccagccataacccagggtcacccaatccttcaactcaactccaagcccactcaaccttccaccagtcaccctaaaccaaccgaacctcaactcctaacccattgtcaataccaatccctatgtcaatgccagtgaaatccaaaattcacccttggctgcaacctctaagcatctctataccgaccagccacctccagctaccagagcctccaatccagcttcagtgcttcaactcagtcccgaagcaactgagatcctagatcattcttcacccaacctcaccccctacaagcatccctgactcaatttgcaagcttttctcaccatccaaattccaaattcaaccccagttctaaaatcagtgaaatcctaagtgaaatcctaaccttaactcaaatcagctccagatacagcagtgaccaaaaactcatctcagcccaacttaaacacgagttcaaccttcacatcaactcttcctctaggcatcctcaccccagtatcactcccaacactaaaccaactccccggttcctcaacacaactcaaatacaggattttaactccgaccctaaccccaatcctcatcccagccgtaaaagaacccaccagctccctacgctcaaactcagcctcgattctttcatttttcgtttttagaattgggagcagattttattttattttagattcagtggggatgtgtgccagtttgttacactgggtatattgcatgatgcagaggtttgggtttcttttttttgagacggagtcttgctgtgtcacccaggctagagttgcagtggtgcgatctgggctcgctgcaacctctgcctcctgggttccggcgattctcatgcctcagcctcccaagaagcagctgggataacaggtgtctgccaccaagcctggctaatttttgtattattagtagaaacagggtttcaccatgttggccaggctggtctcgaactcctgacctcaggtgatccgcccacattggcctcccaaagtgctgggattacaggtgtgggccaccgcgcctggtcgtagaggtctgggtttctaatggtcccattgcccaagcaatgaacacagtacccaaaatgtaggtttttaaccccttcccccctcccttccaccctttcccattttggaaccccagatgtctgttgctcccatccttggtctttcactcaagctggagtgcagtggtgcaatcccggctcactgcagcctcaacctcctgggctcaagcaatcctcccacttctcagcctcccaagtagctgggattacaggtgtgtgccaccacacccggctaatttttttttttttttttttgagagagaattttgctctgtcacccaggctggagtgcagtggtgtgatcttggttcactgcaagctctgcctcccgggttcacgccattctcccgcctcagcctgctgagtagctgggactacaggcgcccgccaccacacccggctaaatttttttttgtatttttagtagagacgggatttcaccatgttagccaggatggcctccatctcctgacctcatgatccacccacctcggccgcccaaagtgccgggattacaggcatgagtcaccgcgcccggcctaatttttgtattttttttgtagggatggggttttgtgttttgtttgtttgtttgtttgagatggagtctcgctctgtcacccaggctggagtgcaatggcatgatattgactcactgcaaactctgtctcctgggttcaagagattctcctgtctcagcctcccaagtagctgggattacagacgcacgccgccacgcccagctaattttttgtgttttagtagaggcgaggtttcaccgtgttgcccaggctgatctcaaactctgagctcaggcaatccacctgcctccgcctcccaaagtgctaggattacaggcgtgagccaccacacccagcctggggtggggtcttgctatgttgcccaggctggtctgaactcctgagtttaagctatccttccaccttggcctcccaaaatgctgggattacaagtgtgagccaccaagcccagccagcctcaattcttaatcctttctcaatgtcattcctaattccaaactctaccctaatcctaatgccaataaacttctccatccacattactacaatcctataaccatctgtagggcggacagccaccaacaggtcatcacagtatccatcctaaatccaccctccatgcctcaactcaacccaaacccaaaagcaacagaaattctagatccaacccttcacccaaccctagacccgatatccaccctacctctaattccagtcttttttttttttttttttttttttttgagatggagtcttgttttgtcacccaggctggagtgcaatggctcgatcttggctcactgcaacctccacctcccgggttcaagcgattctcctgcttcagcctcctgagtagctgggattacaggtgcccgccaccacgcccggctaatttttgtatttttagcaaagacggggttttgccatgttggccaggctggtttcgaactcctgacctcaggcgatccacccaccttggcctcccaaagtgttgggattattggcatgagccactgcgcacggcactctaattccattcttaaccctacactcttctcaatgccatccccattccaagctctatcctgatcctaatgcctgatcctagagagttgtaactcacccaacctagaccaggaagccatcctcaaagccaactccaagttcaaatcgccaccaccctcttggcatctggacctaactccactgcagcctccctctggggcctgcaagcccaccttggtcttgatgcaggtgtccagggctgagtttctgatggccagctccatcctgagctgctccgcctccctcttcttctcttccagctccttggccaggttgtctcgttccttccgcagcaccgccttctcctccagcgctagctgggtctgccgggagcattcagcttggagcttggcctcccgggcctgagcctccttctccaccttctgtttcgcctcctgactggcccgcaggccctgctgggcttccagcttctggcgttggaggtctgagttctcgcgggccacgcgttcgatatccgcccggaggctccgggccagctcctccaccttggagctcatgaggctgggcatgtggtcgcaggctctgcggatggaggccaattccgagcccaggggatggtagaggttgtaacccaggttgtccaggctgcgtgggataatggagtccctccacaggttacgaaggtccatctcaaacttgtccttgtccaggggcaggcagagggcttgcaccttttgcagttgctccttggccagctggcgctcttggtgctgcagctcccgggttttcacgcattcaaccagctgttcctccgccacgcgtttgttcagcagcacgctttccttatccttagtgcaaatggtcttctccttggctatctccacctccagcgtcttcaccttctgattcagcatgaagagcaaggctaaggaaaacaggaccaggagacccaggaagattgggggctgccgagagcactgggcagggagtccaccaccccggctccctgcagccttagcactcaccatcgcagctcttgttcatgtccttgaattgatctctgcattgcttctcactcaagatgatggcagccatgtacctctgattgttcgtgtagatgacctgcccggaagataggggaaggacgcaggacagagcttagtgtcttgcccccaggactgcctggacccagatcgagcaccctggtggccagagtgagctgagttcacaagggcatggtccctttatgagggaatgttagaagccaggtgtggcagctcacacctgtcatcccaattacttgggaggctgaggtgggaggatcactcgagcccaagagtttgagaccagcctgggcaacatagtgagactcccatctcaataaaacaaacaaacaaaaataaataaacaaaaatatagtggatgtttgtctgatcttcaaaagcttttacagttactactatccagaaataaaaagacacaaagtataaatacatgctacaacatggatgaactttaaaaatattacatccacatttatggtcaactgaatttcttttttttttttttgaaatggagtttcactcctattgctgttgcccaggctggagtgcagtggcgcaatcttggctcaccacaacctctgcctcccagattcaaacaattctcctgtctcagcctcccaagcagctgagattacaggtggctgccaccacgactggctaatttgtttttttgtttttggtagagacagggtttcaccatgttggccaggctggtcttgaactcctgatctcaggtgatctgcccgcctcggcttcccaaagtgctgagactacaggcttgagccactgtgcccggctcgaattttttttttttttttttttttagacagggtctcactttgtcacccaggctggagtgcagtggcctgatctcagctcactgcaaccttgacctcccaggctcaagcaatcctcttgcatcagtctcccgaggagctaggactacaggtatgcgccaccactcctggccaattttttgtattttccttagagatgggggttttaccatgctgccgaggctggtcttgaactcctgagctcaaagaatccaactgccagggcctcccagccctgaatttttttgttttttttaaagagatggggtctcactctgttgcccaggctagagtacagtggagtgatcatagctcactgcagactcgaactcctgggttccagtgattctcctgcctcagcctccccagtagctgggactacaggcctgtgccaccacgcctgactgatttttaaatttttttttttttcttgagacagagtttcgctcttgttgcccaggctgaagtgcaatggcgcgatctcggctcactgcaacctccgcctcccgagttcaagcgattctcctgcctcagcctcctgagtagctgggattacaggcatgcgccacaacacccggctaatctttgcatttttagtagagatggggtttctccatgttggtcaggctggtcttgaactcccaacctcaggtgatccgcctatctcggcctcccaaagtgctgggattacaggcgtgagccaccatgcccagccttaaatttgtttttgtagagatggggtttcactatgtttaccagggtggtgacgatctcccccatcagcctcccaaattgctgggattacaggtgtgcaccaccatgcctggctatggtcaactgatttggacaaggatgctgctatgagctcaactgtatccccagtacctgagaatgtgactgtatttagaagtagggtttttttgtttttgttttttgtttttttacacagagtctcgctctatcacccaggctggagtacaatggctcgatctcagctcactgcaacctctgcctcccgggttcaagtgattctcctgcctcagcctcccgagtagttgggattacaggggcccaccaccctgcccggctaattttttttttttttttttttttttgagacggagtttcgctctttttgcccaggctggagtgcaatggcatgatctcggctcactgcaacctccacctcccgagttcaagtgattctcctg
